United States Patent Application Publication US 2022/0211063 A1 - sequence listing, part 11

SEQ ID NO: 9 - DNA, 4395503 bp, Penicillium roqueforti (residues 2,930,337-4,395,503 of 4,395,503)
  misc_feature (85031)..(85335): n is a, c, g, or t
  misc_feature (96911)..(97034): n is a, c, g, or t
  misc_feature (167456)..(168880): n is a, c, g, or t
  misc_feature (174644)..(174784): n is a, c, g, or t
  misc_feature (186874)..(192764): n is a, c, g, or t
  misc_feature (360720)..(360911): n is a, c, g, or t
  misc_feature (391859)..(392018): n is a, c, g, or t
  misc_feature (496616)..(496804): n is a, c, g, or t
  misc_feature (596148)..(596377): n is a, c, g, or t
  misc_feature (682735)..(683365): n is a, c, g, or t
  misc_feature (719025)..(719113): n is a, c, g, or t
  misc_feature (843411)..(843580): n is a, c, g, or t
  misc_feature (1092789)..(1092960): n is a, c, g, or t
  misc_feature (1157612)..(1162711): n is a, c, g, or t
  misc_feature (1192629)..(1192806): n is a, c, g, or t
  misc_feature (1228309)..(1228420): n is a, c, g, or t
  misc_feature (1338837)..(1338992): n is a, c, g, or t
  misc_feature (1570220)..(1570421): n is a, c, g, or t
  misc_feature (1572469)..(1573106): n is a, c, g, or t
  misc_feature (1778958)..(1779105): n is a, c, g, or t
  misc_feature (2068448)..(2068525): n is a, c, g, or t
  misc_feature (2226907)..(2227126): n is a, c, g, or t
  misc_feature (2309629)..(2309784): n is a, c, g, or t
  misc_feature (2399286)..(2399465): n is a, c, g, or t
  misc_feature (2468194)..(2468410): n is a, c, g, or t
  misc_feature (2498732)..(2498791): n is a, c, g, or t
  misc_feature (2576563)..(2576818): n is a, c, g, or t
  misc_feature (2701365)..(2701585): n is a, c, g, or t
  misc_feature (2766468)..(2766583): n is a, c, g, or t
  misc_feature (2901265)..(2901529): n is a, c, g, or t
  misc_feature (2994270)..(2994415): n is a, c, g, or t
  misc_feature (3046136)..(3046256): n is a, c, g, or t
  misc_feature (3064281)..(3064611): n is a, c, g, or t
  misc_feature (3131064)..(3131222): n is a, c, g, or t
  misc_feature (3154998)..(3155745): n is a, c, g, or t
  misc_feature (3156700)..(3157011): n is a, c, g, or t
  misc_feature (3186962)..(3187622): n is a, c, g, or t
  misc_feature (3198509)..(3198780): n is a, c, g, or t
  misc_feature (3203214)..(3205188): n is a, c, g, or t
  misc_feature (3205915)..(3206227): n is a, c, g, or t
  misc_feature (3207673)..(3207831): n is a, c, g, or t
  misc_feature (3257366)..(3260963): n is a, c, g, or t
  misc_feature (3261769)..(3386768): n is a, c, g, or t
  misc_feature (3388230)..(3394660): n is a, c, g, or t
  misc_feature (3513991)..(3514321): n is a, c, g, or t
  misc_feature (3520839)..(3521231): n is a, c, g, or t
  misc_feature (3528652)..(3531206): n is a, c, g, or t
  misc_feature (3533597)..(3533708): n is a, c, g, or t
  misc_feature (3544084)..(3544271): n is a, c, g, or t
  misc_feature (3640948)..(3641139): n is a, c, g, or t
  misc_feature (3768143)..(3769865): n is a, c, g, or t
  misc_feature (3862492)..(3862826): n is a, c, g, or t
  misc_feature (3867863)..(3868500): n is a, c, g, or t
  misc_feature (3874062)..(3874753): n is a, c, g, or t
  misc_feature (3907446)..(3907673): n is a, c, g, or t
  misc_feature (4023526)..(4023682): n is a, c, g, or t
  misc_feature (4214599)..(4214744): n is a, c, g, or t
  misc_feature (4215831)..(4216343): n is a, c, g, or t
  misc_feature (4384545)..(4386964): n is a, c, g, or t
  misc_feature (4389389)..(4392902): n is a, c, g, or t
  misc_feature (4395501)..(4395501): n is a, c, g, or t
gaccagtgacccagctggcaacgaacactaagaaataccaactgctggggacttcatcgtagtcaagcatcagcttataatgagggtcaattaaagggtcccgacgaatttgttccttctcctcctcggttcggacaccagtgtgctgccaaaacttataaaaggaaggatccaaaatcttcttcaagttgctccatgtcatccaagcccatccaaggctgacttcagcgtagttccagagcaacatgtgaacaatagtggccgtgagcccagcgttggatgtgatgagatagttcacgtacgtggcggtaaggtaaggagctccagcctgatccaccagggtgctgttcacggtgaagtctgcgttcatgattgcagtctcgttgtatgggacagcagtggtcgtgtttgagctctgatcgtagagaagctgagacatgaaagggaaatccttggctctccagatatttccgtagtaaagtgccatggagaggatgatacccccgatataaccaatgaaactgttggccaaagtttgaagcggcatccaaagtggggatccgaaaccggcgatataattccagtcaaagcagacggacaggaatcccatgccctcattaccctgggagcctccgaacagatttgtgaagatcagattgtgttggtcggccaagcagaaaatggaaaccgcggacaaaagtgggaagatgtactagatattgtcagagcctgtaaggtagatcgatgtggttgagcaaacgtacctcggggaaccattcccagcaaaagatagccgcgaatacgatccagaataccttgaatctctgcttggtctccgctttgggcttgtgcaaggtctccatgacagtcgtgatgggtaggttgatgggatacagcattgaggtggggtgtaccaaaacattgcgcatcatgcctgcaacgccatacccaatgagctgcgaagaaagcgtaatgaagattcccgcagctacattaggatatcctccataatagagcttttgcacagccaaagcttccgtagacaaggccgagacagctgccgccgaggacatgaggactgctgcggtgtgttccttccggttccacgggaaagggttgagaaaacggccgatgacaccccgtcgtgggataaaggtagacatagccgtacccagagtttgagcaaggacagtcaagaacatgaccgagacgtaaacaacctggggcttgaagtacatgatctcttgcaggaccgctccgaacgcggacaatccgagacctgattcgagtcagcgacatgctagattaccacagaggacacaatgaaaaggctcaccaatgaagaacatgcggaacgtccatggattgagtgttgggtcatcgtcaacatgaatgacctgagtgacgatctcctccgcagtttgaaggggagctgcagtccccttcgagagagcttcggcgtcgtcataaatcggaagaggcacttcgtgaatagaagggacctggtccttttccccgcccttttccccaaacttttcgctgttcacctccgcagagggtacgcgctcaaccagggtgtctgttttggttggcgtcgtcgccatgtcgaataacaagtgatgtgatgtctcaggaggcaggactcagaagtgagagatgttcaaaaggtcaagaaattgccaggtcgggtctgctgatatatcatcgataagaggagcgcaagaagtggcattcccctcccctcccctccccctggactactagcgctcgagcccaaggttcaagaaacccagctcatagcacgataaggactaatcccagcctgtgatcgaacgtaacaaccacttgtcctaaaacagaaggtggccacaggccttagattggcgcgcccacctggattcggtattaccgacggggcgccgtcgagcaggattccaatgcacgaaccagatacaccgctgcgacgataaagatgcaggtctcacctcgtagtggcgtgccatccatcccttgtattggataaggaataagtcactaaaacgcttatacgtaatgtggatgccacgctaagctatctccaatcccacccccggaagcattgtacaatccgagacgcttctccgacggagtccgcgcgctgtcccgaactcgaccaaaggggctatctgagtttcgtcgccataacccgctcaggaacaggcgagtgttgtaatatgttgtagagaaataaactagggaagggccattgtttcaattgacaaagagtcaaaaacattggtgttattactggtataccgaagttataccagtctggacggtcaggctaagctttttcccgtataaatgctatttcgcttaagctaatccaagccttcgcaagcttttccccaagctttctcgctcaaagtggaacttcaagtccgtggaggggccatgttacatttggtggcggagatatcttaattatgaggtctaatcctgtcgccattcacccgatgtatcatttcatttcatatcactccaatcagaccggacaaatcaatcaagatgttgttagccgtcgggtgacttactcttttaagactgaacttgaagacgggaatcttcgaattcggtcttacctcaggctcttacgagttgattcccaagtgataaatgtgcaatcaagtcgcaccaggtgctgactaacatgacacgtgattgactggccctccctcacctcttgagaaaacaatgcgctccttgtccgacagcaattgtcctggtgaggacgacctaaccgcagcgatggatttgactcaacaatttcagcctcaacacacgcataaatgagaatcattgttgcgacttgaaaattacgagagatggaatctgctttgactgaccagctcactgagtcctgcgcccggactactcagtgagccttcctctgaacgcccccattaaagccaagacacaatccgggggaggaaaactataactatcgagcgcggaatactgcgagcgagatttatcatcaagttgaaccatttcaggtattctgagatggatgattaatctcaccatgcacgatttgaaatcaatctgacacccatacctaccattaggtatcgtaagattccgcgatcacccaacatctataaatattgcgaatatcaaacgccataacgcctccacctgggagcttcttgacatccaacatttacattctgttcatagctctaaatatcatattcaacccaataattactccattcatatctaaacatcaacatggcaaacatcaaggttgctcttgccggagtatgtcagcaaacgaccctcatactatcccattctctaacatgatccaggccagcggaaacctcggtcccgccgtactcaaggaactgctcgccgcaggctttgacgtgacagtcctcacccgacaaggcagcgataaaaccttcgattcccgcgcgcacgtcgcacaagtggactacgagtccctcgactccctcaaggccgctctgtctggacaagaagccgtagtcagcactctacatgtcggcgcagttccgatatccactcatctgcgcttgattgatgtagcagtagcagctggtgtcaagcggttcatcccgtcggaatacggctgcgacaccacgaaccccctcacgtccaaattgcctgtctacggcgataaggtcgtcatccaggaacatctcaagaatgtcgctaaggaatctggcctcagctactcgttcctcattactggtcttttccttgactggggtcttgagaagggtcttatagtcaattttgctggcccggcgacgctgtatgatggcggtgatcgccgttttagtgcgacgactctcgctggtattggcaagggagttgttgggatcatcaacaaccttgacgctactaagaactccacggtctatatcaatgaggctagggtcacgcagaatgagctcctggaattgtctggaaagagccttgagacgaaggttgttcagactgcagatctggaacagcaggcttttgcggaactggctaaaccggcccccaaccggacaatctttgctacgaatttgattctgcgggctgtctttggtgaaggatacggcggtcttttcgaccctgagaaggtctcgaatgagttgtttggtctgaagattttgtccaaggaggaactccgcggcctgatccccaagtaatcgttcttttcgataatagtctcagatgttccgttgtatacgtcgagtgcgtatatcaatccaattaatcaatcaatcttattcctcttccgtaccttatttagacagggtaccaatcacctaaatatgtgcaccgcgtaataatatattcaaactcgagtcaaagaaataaacacgaagccaatatagacaaagtaaacaaagccaataattcacagtaaagtatcaagcccacttattgagccgaacactgtccaccgaccacacagagaacaggcagatcagcaacactattcccaacccagagcttaatgccgcgtccattgacaggagccttccaatcctgcaccacaacatcccaaacactaacgtccttccgggtaatatccagcgtaaccgtctcactctgaccaggcgcaagctcccttgtcttttcaaactgccggagctgcaaggccggcgtctccagtcccagactagacggaagctcaacatacagctgggcgaccgccttaccggttcgcttacccgtattctggacctccaactggaccgtaaatacagtctcgaagagagcgggattccccccctcgccacccccggcccgggggactgcatgcggctcggtgctgtagccgtccgggtaggggtatgtattcgtggcagtgatcgactgcgggttggaaaggtaggggtaaaggtagcgccagatgcgggtgaagctggtagacgaccaggcgacttctgacgcgtccggaatgctggtgttgtaggacagggttggcggctttgtgggtcgtggagctgggtaagctgagtctagcggggtttttgttgacagcgaaggctgggaaaagttgaaggtggtgtaagagagaccgtggccgaatgcgtaccgaggtgtgatattggctttaatgaagtggcggtagtcgatgtatagcccctcggtataggtatcttggatctggccgaatggttgactgatcaatcccacgctatccgggtaattatcttcgctgcgaggaatggtgtatggcatgtggccgcttggactatagtcgccaaataggatatcggtaagggagttgccagcttcttgtccagggagatgtgccacgatcactgctttcacggacttgagttcaatccactcttccatcaggatgggaccgacggtgtgaacaatcacgactacattggaaaacttctctgctgctgctttgacgagatcgtcgccatcgtgccaagctttgagtccagcttcggttcgatctcccgggttcccttcgactgtgatatagttttcgcctgaatcggcactgatgaagacgagagcgatatcgttggcattggcggtaacgtctgaggggaagttgtcggtgatgtggaactcggcattcttggtgatattagagattgcctcttgcggtgtgatcagatagggtagcctggctgtgccactgccccagcccatggtcagcacgcctttgttgcacccttggtcggcgcatgagttgagaccgtctggatttccacctgcgtctgtgccgaataccttgagagaatcattgctacgcagaggaaggatgtccatatcgttcttcagcaaggtaattgcttcccgtgcgacggctctcacggtgatgttgtgatttcctctcacatcgacaaactggttaacgacaccagatggagaaaataaagcaccggggtaaagcaagccctccttatcctgggtgttggtcgagaagtttggcaagggatagtccttatcctgtccgtgtttgtaccaagtagcaacgatacgttgaacctagacccgtatattagacatgaaagatttcacatagaggaccacgtaccatatcgttgagacggtcgacaggaacactgccattcaaaactgaacgcgacagctcaggaccccagtatgaatctccgaacaaaggaactgctccatcgccaggcatggacatatccaaaccagctatggccgacgcaacgccagagtaatgacccagccagtccgtcatcacaaatccttggaagccaagctcatccttgagaatcccattgaccaacttgctgttctgagagcacgaagagctattgacctatcagatgtcagcaacacacacaaaataaggactgaagcgactcacatcggaataagctgtcatcaaggacccaacacccgcacgaacaccctcggcaaaaggccagaggtacagttcatgcaatgtgcgatcatcaatattagacgaatagccctgggtaataacacttcccatgcgatgcatttcctgctcattaccaatgtaatgcttgatagccgcgatagcaccggtactctgcataccctttatagtctgggcacctccaaaagcctgcagaacaggatcagcaccgaagccttcccagttccgtccaccgcgtggcttgcgtcccagtgctcccacggatggtccgaggagcacattgactcccttaccgcgagcctcctcgccgagcccaacacctctctcatacatgagctctttgttaaaggtcgcgccaaccgtgataccaggcgggaaggcagtattgtggtccgagttgcggactcccagagggctgtcttggaggcacaagttgggcacacccaggcgaggcacgctgcctgtctgccctacgcagggccccatgaagaagccagtgcctgtagtcagattgactttctcggccagcgtcatattactgacgagaatatgcgccttggagtaggcttcactccagtcggagatccagcctcctggaggtgtgggatagtatgcaggtgattcatagccttctgctgctctctcgtgtaggtgggtagtagattcgaattcttctggtactggggaagctaggagaagcggggtcaaaagagagactagagttagatgcacccaaggagccatggcgatggattcgctatgaacaaaaagaatgtaagaaaagatcgtatattggccagtcaagagaacgagtgcatttttttccaggttcgaatccggggattccaaacagacaggatcgccaggggctataagagaactacagacggaggaactacgtgggaaggagcaacgcccgcgtgcatgtctcggggaaatgtatgttcacgcgtggacgcgtggatgatctttgctggattcgaggaggatcgtcatgggaacccgttgatattgcacttggcagtgcactgaatactaagaacttgtcacgatttttcaaggatcgactcgtgactagtctactagtgaattcactcccatgggcgagggctgcctgacaagaaacccgaatgctgataggctgcatagtgtcaggggttcagcaattaaatatgcaaaccagcacccccttttcttcaacaattcactgtccaagttcattcagtcaatagttcatcgagatattccaatgttactgtagatagaacacgcggcactggcccgcttgatcgccattgaaatgataattgctcaatttcattcgttgttatacatgtccacgtctttagatcttggtgtagcgcaagtaaggcttgacctcgcgaacttcaccaaacttcttcttggcatccgcggtactcacagaaggaggcacgatgacatcatcaccaacgttccagtcgatcggggtagttacacccttcttatcaccggtctgcagggagtcgatgactcgcaagacctcagcggagtttcggccggtggaggcggggtacatcatggtcaggcggatcttcttgctcgggtcgataatgaacacggagcgaatagtaaacgcaacttctttttgcccgatgctatcctcgtcgatcatgtcgtacaagaaggcaactttgcgctcggcatcggcgatgattgggaacttgacttgagtcgagccgacttcgttaatgtccttgacccactggtcgtgggaaccgagctcgttggcactctggagagagtgggcgcatcagctaaggctctgtggaagttataaatggcactcaccaatccaatcatcttgacaccacgtgcgtcgaactcatgctgaagccgggcgaaggcgcctaattcggtggtacacacctaatttcgtgttagttcagtgtcttcgtggagcatgttggtgagaaatacgggcgtgaagtctgcagggtgtgaaaagaggatggtccacttatcaccgatgaactcatggaagtcaatctcgccctgagtagtcaatgccttgaagtttggggctgtcttgtgttagcatggtatattggcaatgcaatcctgttgaaactgtaccaattgagcccaagcgcagatgcggctgttccaccttagccgagtagaggcggctgaaagcgggcgcacgaggcacctgcgcagaccacgaagcccgtggagcagcgccgagggcacggaacatctgagagccaattcttgaagccatgattgttaagagtgaaaggtgcaatcttccaaaatccagagttgacgttgactactcggggacttcagaaacccctgggccccgggaacccggtcgacgtcatcaaatctgactaagcggccacttccgcggtgctgcaacgacgtatcacttccaaggttggtttgtcttcacgccagatatatatctcatctttctagtactgaatctgaatattccttgtattccttcaaatatctcgtatattgtaccatctaaagtacggaaattgcacaatcaagatttatacaaatcctacaagatccatttatagaacgccctatccatatatccgagacatgaagtactatatatactatcagacattccgatgtacggcgtgggaaatttgacgccatccacgggttaaactggagtcaatgattggaccaattagagccccaaatccgagacccttaatcgacacttggtcgatgtccacaatgaagtcagccaatgccgcccgtttaatagcttgaatgattcctacgagatgaaaataatgtatatttgactaaaaaaggagagtcgctatacaaagtatcatatggaacccttgctatcccttacgtatgtatatacactgatttacctgatatataatgcataaggaagcttcacaagtcgagaccaagcttttgtgggccctcgaaggatctttctaacaaagagacggcgtttccctgaaagttggcagatccctttttgaaagtcttatctttgttcttttctcccgaaaggtttcgccaccatcgatatgggacggcttcactacctactcggtttgctgctattgttcatttgttcatttttctggatcgcatcgaatctgggaaaacaaccattaagcattgctcttactcatgcacctcgtgaatcttgcgtctgtagcgaagacaatgttactgtcgcctcagatgtcggtatcataccgtcaaatccaccggaacctcctattaataaagatatgaggccaatatcagaaccacaaataccaagctacctgccaatcgcgaatccccatggtcactacgcacagtcctcaatcccattaaagctctggcaaaaggccggttcaacgaaaatccacgacgaccgccagagagatatcaacagttggctagatgtgaacccacgtctacgacatgagattctcacagacgacagtgcagacgagtacgttcgtgagcattttgccaactacccagaggtccttgatctctatctctcacttccggtcccaatcctaaaagccgatctccttcgtcaattgatcttgtacgccgacggaggaatttggagcgatcttgacgtgacatgtcacataccaatttatacttggatcccggaacaatttcaaaacaaaacaaacgtcgtcgtcggtttggaattcgacgggttccagttcgcgagttggacgatcatgacaaaacctaagacaagccatatcgtggcggtcatgaaatatatcatcgatagactgaaggcatctgctgcgcagtacaatgtgaccactgcacaacttaacatgacgatgatcagcgatgtggtggaagttacgggtccccaggccatgactattgctctattgcagaatctggagaaggaaatgggcgttcctttcggccgggcaaatataaccaacatcaaagaacccaccctatttcaggacgtactcgtgttgcctaatgcggccttttcctctagacaggctggcttcccggcggacagagggccttatctcgttgaacaccattacgctggctcttggaagaatgtcaatggtggcgagacgaaatcttgacatattgggaattttgtattggcgttgcaccgcacgaaatatatgtggcaggacggacatagaatcatgataaacataatctaattttgcattcagcgcttgatcaaatttcgaggaaatgactgttgatagaagaataagtttatgtagtttgcttctatcgtgccgtgtaattttatgctgaatctgctgtctgctgcttgataaatcgaccggccaccatataaaccgccgagggaagaacacagcccggtaaacaagatcgagcatcaattggtttctattttactcactcttccctcacttgatccttactattttctcagttattcctcactctcctctcaccttcctttcgggttgaatataacagccaagcgctagccgaccttcccacggatatcccgcctttccaccagtctacaacccaccccaatcaatctatacgtcatctacagtgccgacccctatgatagcactgattgtggatctactgcctagggcgtatcaaaaccgatatgggcgttgctggcgggggagcaccaaaatctctcgaagtcgtgaccatctcatttacccctgactgattggacgtgatcgtcatcctaaaatcactccctccaagctcaagtacatggtgcacgtcccgttctgtcttggtacgatgaaacaatcttcctcacattctccgtggcagccagactcacctggtataccaaagcatagccgtcacttgattctcaaacggagcgacacagagtccttcctagcacagatgcctacacggtgattacgggcccgtaataatggtgagtataattggtaccaagtcactgcggtcgcaagggagtttgacgaaagtcagcgctgatccgtgctcgttggtccttggccaagaaatatggggttcggaagggaaatcgtggtcgactggacaagcaagccactgtcattgcgcaggtggcgactgacaatagggcgtgagagtcgaagctggtcaagctcgagacagagaccgagactatgtggcccacacagctgactagcttcagtctcttcacgacgctgccaccgcgctcagcaacgaaaacgcggacctccgccagcagatccaggtgacccaaccgtgtgagggtgtggttcggagacgaacaaggcattcagggccgttttcaacagtcagtgagacagactattggagcggtcctggaggcccagtctatcggcgtaagtcttggtgatttcaaagcttctggtcttgcttacaataaagtcccgggctgcgtctgcatcacaactaacccgattagtctccctagactcaaagctataggatagttgaaagttcaatccagaggagcaagcacccactccaagccatccagaaatacccatagaacagggagacacagctgaagcggtaatgcaattggttgaggatcccttgaccactcaatatgtctttggtacagacatagcgtcaagtgattcggacaatgaaggagtaccaagttcctttcttgatgaccaggaggtaggtctctattatcgagtttaaaatgagcatgtctaacgaaagaatatatcggagatagatcagacgttatgggatatcgttgaaaaccttctagagagcctaccctagaatcactgagaatcctacacgaggaagcactccttacgagagaggcacaactccgggtgacttgccatgcaactcaccgagacgccatgatacacactgaagcacgctagtcgtggcatacgttctaagccatatctataagtttggtgttgcttgttctataattgagatgctaactggatggcccacatagtattcgctcaatcaacttaccagcctctacattggaaacgttatgcgtgaatgtcaccgagaacccacaaggtctcagtggaggagctagtcaggggagtgccattttcagagccctctctcgttgtcgaggtttcttgaacagcctttgaagagaacacaagagccattggactttctacctcgatacttttctatcaactgcttatttcagtatcaactttgctaccctatctatcaactgcctatcagaaaaaatacccaaggccgtagatggttctatcaaagagagagttttctcgctcaacaaggatttacttcgtagctccggatcctatgctgtcacacgctacggctacagtttgctcagttcaggcacctgctgctcctttaagggagaccgagcaaaaacacttacggcattcaaatagagctgtttgttcgaaatattcatagttcaggtgaatatctacatgtaactaaggaccgggcttgggagagacggttgatgagcaggtcttgagaagaatcaacttaaatgaagtaaacacttgctagtcaagatatccctggttcagttgctaggaacgaccgtatcccaaggttggcaagctttgtgctttctagtgtcaagacaatggaatggttccattggttcatgtatgtgatctacacgggccgcaaagcttaacctattgagcttaaaggcccacaatagaaaataggccacaatagacaataggccacaatgggttggtattgtgttgggagcctattgatggctattgatggctattgtggcaattcattgtttggagggggttgcctgggcagggtccgtttgaatgggcagtcgttcaattgaggaaggaacgcgtaggaagaacaccgcgtaggcctgcctataaaacccaaccctcgtttttgttttctctttctcctctctctctcttccccctcacacatttatcgcaagaaccccattattaccaacaacaatggctgtttctcgcgtcgtgtttttcgtgcttcttgcggccatggccgcatactggcacactgatcttttccaactcgttggaaccatcgtcgtctttctcgttgccttggtggcagcgggatgctgcatgagcaggtaagtttggaagccttcatccttcatctgtcccctccgtatggccagcctctgggtcatgtctcatggcatcaaaagagttgccatcactgccttgcccaagactcatcccacgcccatcccaactccatcactgccttaccgaagcccatcactgccttgcccaagtcacatcccaagcccatcccaagcccatcccaagtcacatcccaagtcacatcccaagtcacatcccaagtcacatcccaagtcacatcccaagtcacatcccaagtcacatcccaagtcacatcccaagtcacatcccaagtcacatcccaagtcacatcccaagtcacatcccaagtcacatcccaagtcacatcccaagtcacatcccaagtcacatcccaagtcacatcccaagtcacatcccaagtcacatcccaagtcacatcccaagtcacatcccaagtcacatcccaagtcacatcccaagtcacatcccaagtcacatcccaagtcacatcccaagtcacatcccaagtcaaatcccaagtcacatcccaaacactcactcaaacactcgcccaaaagaccattaagactaacgttgagtagctcccgtgggtggttgttccgactgctgcaagctgcagcagtgtcggtcgttgaaccaacaccgaccaacgacacccccgccaccaaggccatctcggccaccgaggccgagatgaagagaatttcgacactgagagcgcaggtggggattttggagcagcagctccgtggcacggaggcacgagtgcgtgactccgagaaagcccgggagatggagaaaaaccgccatgacaaggaggtccggaacaaggacgctcaactggcaaccatctctcgggggatcaaggagtcccggtacgtgaaggaccaggtcatcgtcgagtgccgccagtggcggcgcaagttcgaggacctggaagacctacagcgactggcccagctaaatcccgttcgcgggatgcagggacgtactcgttgggcccctgccaacaaaaacggagtgcgaaaggggaatcgtgctcgaccggacaaggagttcactgccgttgcgcaggtggcaattgtcaatgcggcgtgggagtcgaagatggtcagcttcgagaacgaggcccgtgcttatgtggcccgcacggctgaccagattcggtctctcaacgacgctgccaccgcgctcagcaacgagaacgcgttcctccgccagcagatccaggcgacttccggcatctcccacgagctggcccagcagcaaatgggggaggctgtgagaagcgccttggtgaacgccgagcagcaacatgaggagcgtgtcaagttgctgaagcagacccatcttggggagctgacggcagtcaaggtcgactacgagggaaaattgactaaggcgaccgcggaatcgaaggcggaggcggagaccgcactttcccagcagcgtgaggtaggcgagggagcggcacagcacgcactcgccaccaaagaagcgcagctgggggagctgcgtgccacactctcccagcagctcgaggcgagcgaggcagcggctcaggagacaagttccctgaagcaggcactcgccgccaaagacgcacagctgggggagctgcgggctgcactgtcccaacagcatgaggcgggcgagggagcggcacagcacgcactcgccgccaaggaagcgcagttgggggagatgtggaccgcgctgtcccagcagcgtgaggtgagcgaaggagctgttcaggagacaaattccctgaagcatgcactcgccacccaggaagcgcagctgggggagttgttggccgccaatgccatgatttccgctgagctacaggctagtaaggaagagcaggagaaactggatggtgacatggaggtcgaaacctccagggtcgtccagtacgtgcaagagagggacggcgctattagagccggcaagaaattgcaggagcaattccatgccctgcaggagcagtacgaggaactacggtcctcgtacagcgaccttgcggtggagaaggcgggccttgaggtagaaattggggacctaaaggaagcagtgtccgacctcgccgaccaaggcgaggcgatgtaccaggaggtcgaaggcctcgagggcaacaaccgagccctggcaaatcaaaactccgagctcttttgccagtctttggcatcagacatggagctccagcagactcgggacaaagtgggcaaccttgagcgccaggtgacggattaccagacggcggaggcggcggacatcacgtcggcggttagcggcatggggttcaacgctgaataagcgcccatccgcccgtcttagcctcccccggtctccgtcatcctgctgcagctcggttgctcactttgttgttgtcctcacactgcttcctataggttctcaacccgcccccacctccctctctatcttccttgctgttgtctttgtcttccccccccctattcctcgctgttccatccctcatctgatcaccccctctcacccccctctccggcgcgaccgaccccccgcgaccgaccctatatatatacatcgcagcatgtctcgctaatgactctcggtctcatgaattcaccataccgctcgtttgccgctcggccagtgatgctgagtctggccaagcttgtgctcgttgcgatatggcaaattcctttcaccacggcggcgcctgtcttctcgcggcttgttctgtcatctcccgacacagaacaggggaaggaaccgagcgatccaagtttatggctttatttgggattttcggctgctcttgtgttgagcggtggagcattcgcgggtcttacgattgccctgatgggacaggttagctctttccaatgcggctaaaaaaaaatccccgatgagccaggctaacgtcttgattgtttcgtacaggatgaagtttacctccaagtcatccagacatctggcgaagggcacgagaggaaaaatgctactagtgttctcaatctcttgaaccacggaaaacattgggttcttgtgacactactcctcagcaatgtgatcacaaatgaaactttacccattgtccttgaccgcacgcttggtggtggttggccggcagtgttaggaagcactgctttgattgtcatcttcggcgagattgttccacagtctatctgcgttcgttatggtcttcccatcggtgcctggatggcgccttgcgtcctggtcttgatgtacatcatgtctccagtcgcctggccaatcgcaaagctgctagacaggctgcttggagaggaccatggtaccatctacaaaaaggccggattgaaaacactcgtcacactccacaaaacattgggcgaagccggagagcaactaaactccgatgaagtgaccattatcagtgcggtcctcgacctcaaagagaagtcagtcggcagcatcatgacaccgatggatgatgtcttcaccatgtctgcagacactgtgttggacgaacgcacaatggacctcattctttctcagggatattctcgcattccaatccacgctcctgagaatccgatgaactttgtcggtatgctccttgtcaagatgctcattacctacgacccggaagattgcaaacgggtccgtgagtttgctctggctacacttcctgaaacacgccctgaaaccagttgtctcgatattgtgaatttcttccaagagggcaagtcacatatggttcttgtatctgaatatcctagcgaggatcgtggcgctcttggagttgtcaccctggaagatgtcattgaagaactgattggagaagaaatcattgacgaatctgacgtctttattgatgtccacaaagccatccgacgaatgacgcctgcacccaagtctcgtgtcgccaaaggcaagatcgtcgaggaacctcctttgaacccctctatcattcccgatggcgacttgatcgacgtgaattccacacaaccctcatctttccctaggccttccgatttgattcgccgccgcagttccgtggaagcacccctccctcgctttcaacttcgaaagactactgccgacatgaattctgactcggcaaatgagtgggttacacaagtcggcgccacagatgagattcgagaacacctaaaacatcttggtccttccaatctggccagtaggccgcgccaaacccgttaccattccgtcaagatcaagcgcaacggcacctctccgtcccgttctgcacaaaccgactttgagtccggacaaagcacctccgactcccaaaagcttcttccttcttctaccgcataccaaggtggcataggtgcgggcttgctcaactccgctggaacagacgcgaaagacggtgcgcatgctctcaaactgggctacggcaccatgctttcgcacgacagtgtaagcaaaagcaccggtgctcatcaatacaaggaccttccccaagtctccattcccgaggccgttcgtgaggaacatgaagacctaccgcgttctgggccggcgcgggaggctagtagtgatgctctacgtgacgattccgaaaaccaaccgcgttctgggccggcgcgggaggctagtagtgatgaaggcagtgttgaatcgtctggtacaccaggcttcgtttaccaccaccgcggaccggcgcgcagtggaagcatcacagaacagatcgtggatgtcaatggtatccggaaagttgttctgcatgcaaattgcaccagttcttccgagggggaatcccatgcaccaggccatgatcacaaccacgaccagcatcataccgatggtgcggtccttgagaccgatgttacaaaatccgaaacccccgacgccggccacgcaaaacccaaaaagaagcgtcgccgaaagaagcatggcaaggcttcaaagtctgatggcggtccctcagagaaccagccgttgctttgatgagccgttagttagtttaatgagacctgtcaaaccatgtattttcacttctttttgtaccacagttatgcctgtagtcatgagatgtaaaagcgcctccgggaaagtctaagtatatttgcattgctttggaacggtatatgccaactaagaagcccaaagcctcttaactcgcgtaggaacttgatataccacatgaacactgggagtagatttcagtcaccttggacagcaattgttgatttaaatgcaacattcgtggagagaacccagaacaggccagcacgcatttacatgtagactcttaaggaacgaaaatcaccacctttgagaaagttgtcttacccataggtaaactatcatgttaccacccactgcctctttctagatagtgagtgggtgtgacatatagagctggattgcccaaacattcagggactaagactcgggattcaataggagcctatgagtgtcttactagcaatccttttcaaacaacccttaatgtaattataaaagccatctagggggaatttaacattagaaccagacacaagtaggcaacctatacaggctacaaatagttatagtacacggatagatgtacaaagagagtaaatgaagttgtattggccggcggcctgaacctgctctaggatgtaacaccgaaagtcgacagtatgagcctcggaatgaaagccatctaggactcactcaaaagggcgtcgtttaatattctgaagtccttggagatatccctcgatcgagtcggacttctccttctcaacccaacccttagtataaactcccctaaaatcaatcaggtatacatcctcattgatatcaataagtatattggccgcctttacatctccctaaatgatattatataaatgaaagtgttgaagtgtgtgtgaaacctgatcaaaccatttttgtcaaagctcggaatatttgggattatatccatcaatacagttgagtgtagctctactacaattgatatataagaagactaatcctatgatatacccattatcatcctagaccagccctcctagttgcgatatgagaattgggggatcgaatttagctatataaatctttgaataagtgagaatctcttataagaatacccgcattaccccaatagactagcttaaagaagctaggccgtggtcgcctatgaataaataatttgcgaggtattgctggcagtgcagctgagtctgcactaattggaacttggacttccctaggatggtagacagaaaagctcgagtagtcgacggaggatggttgcatcctcttggtattactgagataaacaggaactaacttctcttctaccacctgcacagtgtagtggaattcttctgcaaacagatagtcgttaagcgtatacttttgactcgggtccaggggagcaaattcgtggaagattggcagaaatggccgcaaggcccaatcatgcatttcttcaagagggtcttcaatttccctatcattatctatctcagcctcatcgggtatccattctggctcttgacgtcgaacgtgtcgaagatgttcggccaggagggtagatgagctttcgaagctggaagcaaagagatcaatttcgaagcgtttttttggaaacatagacattcaactgtgtgtctttgtttttggtacttgatctaaatagaccgatttcatagatgggttgctttcgtgttatcgctggcagtcgaggagtgcaaaaaataaaggagatagagagtgcagtttatcgatcaaatcggattggaagctaacagagaactagaagagaaaaaggaacaaagagagatgggaacgaagaagcctttaccctaggcattggtagagtcagctatagacggttatatctaactagccgatgatacctcatatctgcagcaggttggcaattgggtctccgcagcagcctttaccattgccaccctaagccaaaaatcgaccgtatggataaaggcgtattggagctagacccaaggtagaattatcacaggttctcctgttacatctacaactataagatcaagacacagaaatggagcaaatttgacttgattttgctcagactaaatacatgaatgatatctcccaaaagactcccccagataacaggatgagacgacgacaaagtgacaacagctgtaacaaaaggtatatgtaatagtccatgtgatgaatcgatcattgcagaagagggtcctagtgggaagttagttttgcaaaacaaaaaaagagtacaggtcgaacataccctgaagtgcttctggtgattgttggctttttgaacgcgggcaacgtagcggttctcttggcgaagggcacgagtcctctcgcggcgctcggcagtaagagcagcttctttttgttcgtcggtaactccaatcatgcccatgccaccgttggcacgagtgataagagagcggtgatggttggtgcggccgcggggaggttcctcctcgatttctccattcgcaatggcaagctggcgggcagctcgttcggcggctgaggggtatttgtgcaggttttgtcggtaatatttggcaagcgaacgatgaccgacactctttccagatggaaggtggagctcgtagtctgcctcgtaggcacctgaggcgtttcgatatgagtcaagatcgtcctcgtcgacggaggatgcagaactgtcggtttcccagccttcatctccatctccgtgcaccttgacgccaccgctcccggcagtggattcgtcttcatcttcggagtaggtgcttcggaaatcgtagtattggccgatttcaacttgttcttcttcggactcgaaggcaatcatgcagtggctcttgtcgcgcatgtgggtttggatggcttgtgcgtcattcttcatagcgtgacagtaaagacattcgaagttttcggtgatttttcggtagagataatgcacgaggccatcgagatccgacaaatatttttgttcggggataaacatgccgtgctctatccgcatgtggtccacgttggtgtgaatatcagatgattcagttttgcagaagagacagcgagtcgccaagaactcgtccttcttgatatcactttccatatcctcatcttcttcttcgtcaatggtggcagccttcaggtcctcggtgaccttgctgacgtcatcgcccgatttggtcacgggctcgccgagagagaaagcggaactttgtacggaggcagcatcgccatccttacgtaggctggccgcacgttgcttgtgcttcgagctgttcaagtgattcttgtacgagttttcgctgtagaatgccttattgcaagtgtggcatgtattttcgtacgaagctttggcagcggcctcattggatgtagctttggcggccagaactttctcgttgaaggtttcgagagtgacaggtggcagagaggcgatgcgacgcttcatgttgtataaactatagaaaatcagcttctgaagtcgcaaaaaaaaaaaaaaatcaagacggaaaagagacttactgccagtctttgcgcatgtgatctctctgaacatcgctgcgttggaaggcaacgagacaggtgttgcaagtgtattgcagcgaggctgcgtcttgggtggtcgacgacatatcggtagattttcgagagtcgtgggtggttgtaagggcgggtttcccctttggattgtgggataaatatttgttgcaggcggggtacatatgaaggctctgcctgggcccgatttgaatgattttttgatgatctgagtgtatattgatgatcaaagtagatgaaagtgatgcgatgcaggtggatgtaagagagaagaattttcggagggcaatggtcctgcgagtgattctttatacactcgatagaccgtcatccagagttgctccgccgcttgaaattgtttcttatcgagcgactagccccctctcgaattccactagtcctatactggttagcgtggttaccgtaaacggcttagtagccttcgaaaaggccggcggaactgagtggaccaaggtccgccggattatttaacttccgacagctccgatgccaaaaggggaaatattttgcctgaggcatcacatcttactacgttatcaggtaagctggagcgtcttcaaggtaggtcgcatttattcaacgcgtggcgacgagtaaaccactagcgctcatcctcgcatccagctgctctcacaccctcagaaatgccacactgctaaaaatgacgaggctccgtggaggttccatagacgacccagacatcgcgcaatcccccgggcacgggcgaacgaacacttatcggtcaaagctcccaccaaacgcatcggatgcgctctcacagaatactattgaggtatccgatccctcaagagtgctaccacggtatcgcgatgatcgaagacgaaagttcaacggcttagtgcgccggtgagtgggactccaaacgctgggcctcgcctcctaattccgtatgacactaattgattttgcggaaaaggtacaaagctcaactgcttcacggctgcgatgaccccggatgtcgaacagctacatgtgctagtcatcgccgaagactcagtgaaggtccatatcgtcggtacacagaacttagtgcgaggacgctggcatgctacctcgccagcttggacgacccggagaccggtctatgtctcaatgtgcctaagcctccacctcaattgacagtagaagattaccatcggatgtccctgcgccgaacccgtacacttgaagcacagacggcagcggctaatagatcgccaaaaccggatcagtatgacgaagaccacccgacccgcgatatgtccaggcctgcgcaagatagatcagcagtgtcaaaagtgacagaagggggttcttcgcctcaagtcaacaccggtagcagctatattcgggaccttgaccataccgcagagcaacaactaaaagaccccaagtcctttacacagaatctctttgatacaatctcgctccgtatggtcgaatggcttcctcttcgccgtgctgcggatgcattagagtcaaagtctaaaccccttgcaccgggaactgcgagctatccatctgctgctgagaagcaccactgcgatgccgataaagttccaggcagagatgtgaagattccagcgagttccacgcctgcaaatcagcccatctctcaacctcgtactccttcatcgcgaacgtcggcatcgcaaccccctgcggtcgagctcaagttccagaaccagcatgtcaagcgactgtcaatctccgaggttgaccattggcgccagagtccacgatcaagccttgaagataaaaagaaaccagaatttagcaggaaggtcccggtggcttcttccgatgagtttgtcagcttgccctcaccgccggcgttaaagcaccgtccgcaaaagcaccgcggaagaattggggacgtcgattcggttcctctgaagggacaccgcaaaagtcaacgacgtgtctcctgggacagccagaagctgctcgatgaggtatctcctatcaacaatacgaggagcaaggagctcatgcctcctcctcgccctttcccttctgttaaccaatcccccagtgagcgcaagacaaagcaacctcctgttgaaaattcgttagacaccattcctctggctcagacgatcactcatcttacccccgagattatcgatggtctgtcacgggtcatgattgaatctgcggaagatgctgattgctgggaggaagagcttgatcgtattcagtgcactggcagctttgagcagccggattggtgttttgcaactctgcgtcagcgtgaagtatttccgttcgttgcccaaagtgtatttttcgtgttcagcagccccaatcaaattctgcgctccttcagtagcgagccaacagatatgattgggactactttcagtcgccttgatgtttcccatctgcgtttatcgctgcagcgcctgttcacaatatgcccatgggatattgcactacatagcctatggagctctctggacaagctctttgttcccccgcggggatttacctcttctggacggccatcccgccgatcgtctcgcagttcgaccatgacaggacctgcggcccctccgatcgttccccgacgagtttctgaatctgccagtgaccatcatatgtctgatcctgatgctgcctacattgccacgattgccttgttcactttggtcagcttcttgcctaagattgacttggggacttggaaagcggtggttcggatgcgtgccgctgggtctgtagcctcgctctcggacatgcgcaagctgccttcgaagaatgcccagcaagctatcgaggtgacggacagattcgagcacgagttaggtcttcgcctcattaatcgcctcgtgcgggctctcactgcacgactggcgtatcatgaaatctccaaggcccgccaagtgtacagcctcgacgtaccaaaacaacgaagactcagcgtattggaccgtgtcattgactatcttagtgagcaatacatctctcacactgctggcagcgatgagcccgctgagtctatcaacccatcctctctcattgttgagtggcttcggactcttttcctgcgtgaatgggacggcaaccccgagatggctcgtagcagcccagccggtggtgccgttcagattctagcctcaatgtacaaggaacgaaaccggttaggtcttttacccgaagacttccatacacctcttctcacggagcggctggacccattggatatgcccgtggcatgggttggaagcctcacaaacaaccgaaccatgcatctgctatcatattctttccttttccctccgtcgtctctcgtgatctacttccgtgctttgaactatgctgccatgaccaagtcctatgaggcggctatgaccactacgagacatgtcacgcagactgcctttggcgccattcaaatttccgatgatcctcgactcctcacctccatgaaaacatccatgtctacttacctcgtcattgttgtccgccgtgacaatattctctccgatgctctgagccaattatggcggcgtgaaaagcgagaactgatgcgacctttgaaggtgcaaatgggcatggatgaaggagaagagggtcttgaccatggtggtgtgcaacaagagttcttccgtttgctaatgggtcaagcctttgacccatcttatggcatgttcacggttgatactcgacaccgcatatcttggtttcaaccttgctcattggaacctctctacaagttcgaacttatcggtctgttgatgtctattgcaatttacaacggcctaaccctccccgtgaatcttcccactgctttctaccgcaaaatgttgggtctgaaggtgaagcatctggaccacatccgagatggatggccggagctaagccaagggctcgactcattattggcatggaaagatggcgatgtcggcgatattttcacaagaacttacgagttcagctttgaagccttcggaagtgtcgagacagtcgacatggaaaaagttcatcgtgatgcagcgtggcctgttgctagcaaagtcaaaatcaccgctccggctcctatagcgggctccagcgcctggatggacgtgccagcttactgcgaccctgcgacattgagatcaccaacctccatggcagtcgaggagaccaccgatgccacaccttgtgagcctgccccagacacggccgtcaagtcagtatctgagtccatatcacttcagtcccctctgctccaggatgaagaggccgctcttgtgacgaataaaaatcgaaatcagtttgtcaaggattacatcttctggctcacagacaaatccattcgaccacagtttgaagccttcctctggaaggcttcaacacatgcctggaccgatcggctctatccatcttctcccccgaagcccttaaaaccgtggttgaaggtattcaatcgattgacgtagacgagctcgagaaacatgcccggtacgagggtggatttggtcctgatcatcgagtcattcgtgacttctgggatattgtccacgaataccccaatgagaagagggcccaattactcgaatttgtcactgctagtgaccgagttcccgtcaacggtatctcaagcattatgtttgtgattcagaaaaacggcgttggagatctggtaagttctgccactttttatagcctacataatatggattgttatactaattgctcttctagcgtcttcctaccagcttgacgtgcttcggacgtttgcttttgccagagtactcttcaaaggagaccttggcaacgaagcttgacaaggctctcgaaaatgctcagggattcggcgttgcataaaaggttgtcagattacattttgcctatacatacccatttgttcgatatttcattgatgtggtgttagcattctatctcatacggtgcaaatagcatagtttcatgaagcacttgtctttacatggacatctcacgaggatttaagatagacaaatcatagtttatagatccccatcgtactccaatgcagggctctggttcgcctgacgatgtggcgctccgcaaatttataccaaatcggacttctgaggtccggcgatgactcttagcattcacatccctaagtgtatctgtttactcttttactcgcacatatctctttacattcggaaattccctttgggccaagtcttctgtataaagtaagacactccgattcgcacgcacaacttacccgctatcaccccccacgtcccgcgataagcgcccatcttcgccttcaatatctgcaactcctgcaagttctaacgtgaaatttaccagcttactccaaatacccgattgaacgtttgatcatggctcccattattcactgcgtccgccacgcccaagtatgtccttatagtgacagtgatcgcaactccctgagcctcgacaactaatgcgcaacatggctcttcactgctcagtcgagctaatagataatcgcagggcctgcacaacgtttgcaccgccaaccacattatccaagaccccgttctcaccgagcttggccacgaacaatgccgaaagctccgcgagagtttcccccgccatgccaatatcgacctggtaaccgcctcgcccctccgtcgcaccatctatactgcgctcgagagctttgcgcccgtctttgaatcaaagccggacttgaagattatcgccctgccagacattcaggagacttcggacgttccgtgtgataccggcagcgacccttctgttctgaaggaggagttcaagacgggggttgatctggatcttgtacaagatgggtggaataacaaggtatgcttctcattttattgcacctcgaaattgccccattattatccaaaacgtggattactcacatttgtcaaaaggcatctggtcgctacgccccaaccaacaaagccctcaaggaacgcgcccgtgcagcccgtcgctggctgaaagcccgcccggagaaggaaattgtcatggttacacacggcggcttcctgcactatttcactgaagactgggaagacagcagccaattccagggtatgtgacgtcaagctacgactgtggagaatcataccgctgacgccgttttccattgttccaggcaccggctggtctaacaccgagtaccgcactttcgctttcagcggggaagcacacacagatgatctggagggatacccgctggacggtgataatgcctcacttgaggagacacttgaatcacggcagcgccggggtaagactggacccatgcctagtcgggaggaacagaagacgctgtataagaagggctaccagggttgggatgaccagggattgcagatgagcactgctgatcgggaggcggctaaggccactggaggtgaggaggtcgatggggtccgcatataactgggcagaagaagtgtgttttgatggacattgctatcgtaattttcggttgtcgcagatggcgacgggtaacaaggatagagcgagtacatacatagatctgacatgaaccaaaatggattccttggattccttggatgtccaagactggctctttattccattgtctgttgctttatttgcgttagtccccttgactattgagccccttgggctattttagccctcggtggctgtttcagcaaacaatagaacaaagctgacaagcatgcattatatgcctccattgttgagttctttactcgatctaagtcttctttatcttcggttgtgaacaatgaccttggcctcggaacacgaaacagtctgccatagcctcgacaaggatgccgacaaaggatctgtagaacaactatgaactaagctacccctttgtcttggatatgattgtctatataatggctttctggcccctcgcttttgatcccgtcatcaggagcaatccagcccaggacagagctcaacacctacctgtcttccactactattgcgaaccatccgctgagtaccctttccattcatttttgggatagacactgacaccattatctaggaatatttacataccgagaataccttcttattatatcacaggtgggaggccccccgcaagatgcattgctaacatagaatataacataacagacaaggacaccgaggcattagacgacgagtaccaatccgaacatgcatattacctgtctacggctaagttctttgataacccttatactccccccttggcttcctctactaacgagatccagagattaccgcaccacgggtcgttccagacataccgtcttaaatatcattacacatgcagtaggtcattcccgatgcgcagagacatactaacagaccggattagatcccatacgaaatatttcccccagagggatccaaatagcgactagctgaacggctaagttctttattgcccttcttagaaacatgaattcagtactaacgaagcataggcccgccgatattctttattcaacatcatcacatagctcccatattaaacagctaagtcattcttcgtcctcgtgttactaacccgatttgtatagatacatctcgacgatatatgcacagtatattgtggctagctattagcctagactggggttgattatttgtgccaaatattgcacattgtcttatttatcaagcagctaggtcattcccttgagcccccatgttgactaatttggagtttacacgcagccatatatcactaggccaccgggactagcttgattaattcaacggatgagctgttcacaacgcacctctttaaggagactacctattgttatacttgccaagcagctaagttatcccttctggaccccattacaactaagtggtatcatatagatatcgatgcgggtactcctctcgaccaatctgcaattggtgacggctcgtgccgtgtacgagattagaaaatcgaggcatttcactcttgccaatacccatattttgctgcttagcagcaagtgaccatgagcagactataccatttattaaattactcttgtttctgtctcgctacataatactgtcacctaggaatgaaggaatggatagaaatgggccttttctgattgacatatcctcgctctgatagtagctgatcagctagtacaccacatcgtaaggtaaggtaagatagatacaattatcagtttgataatccaggaaattgtgttccaggatccatggaactttcaacaaacttgtctactgtgccgctccctcgcccacctcacgctgctgggaaagtgcggtctccgccttcgatcccgcggtcaccttagtcaattttccctcgtagtcgaccttgactgccgtcagctccccaagatgggtctgcttcagcaacttgacacgctcctcatgttgctgctcggcgttcaccaaggcgcttctcacagcctcccccatttgctgctgggccagctcgtgggagatgccggaagtcgcctggatctgctggcggtggcagcgtcgtggagagactgaatccggtcagctgtgcaaaccacatagtttcggccttagtctagaaattgaccagtttcggcccaagcgccgcatcgacaattgccacctgcgtaatggcaatgaactgcttacggtcgaccacgattcttcttccgaactccgtatttcttggccggggcccaacgagcggatcagtgctaactttcgtcaaagtttctcacatcaggtgtgaaatcctgccattttcctcaaggtccaatgaaaaaattggatgtaacgccgacgaggtagtgtggggttgtaatgttgcggtgctccagggttggagaccgatagcgcacaagtagagtgatcgaaagatgaagatcactttgaaaagagaggtaaaaagctcgtgaaacttcaacttatagtttattcaggatcaaaaccgataggtagacagatgattttcactataaactaggttagataagtttgagaaatgactcgaatagcctttaccaaggttcttcagctcccgctgggaatctcagcaggcttgacgtagtggtaagctgttgtaaccagccatttaggacgagctggacaagccttctgcctgtgtacggtagaccatcaaccaagtagctatatatcaggcgaagaaagcctcgcggtgtgagacgccagatcgatcttgaacaagagagagtgtattcaaatgaataatggggatggagagagaaagaagaagcaaattggaaattgagaaggaaccagttgatatagctgaccaaaacattgcaaacctcgaaccttctcgctaagctatctagcaaacaatctatctaatggagtaatgcaaacagtaagcgagtaagcaaacatgaagcatctgatagcgatctatcatagatcgtgacacgcgagactaagctcccatgatgagatcgacgtccttgaatttgttagtacactggctagagaaagtcttacttgggttagccatattcctatttcggtatgtatggttccaaccctaagtttaaactgaggttgttgtggggctagcacgtgatcatggctcatcgcgtcagtcacatgactgttcgtattctgggtgatcccgtggtcatgtgatcatacagggtcaccccataccacgtgaccggctgccccaacaatgcatcgccttctaacgcgctttaaatgctggtgccttcaattgacgtacgaatcggccgggggcttctatttttagctgccgatcacccagtcccgtggcgcagacttcacttccatgggcgaactcttgatataactccgcacaaccacctgggtaatctcttgctgcattgtacaccccaaaggacaaaatgatcgatgaaaatttacccagtacgttgtagggactaatttcagcctcgtctcttggtgcagactacgtcatcccctgctagcttcacgattttcatactgaccgcgggacagcgttcttcctcaagaacaactcgaaacaacctcagatcagcacaatatatcatagtcaacacggaaatgaccccgaacctgcttactccttgcacgcgcttgaccccaccgccccaacatcacagaaccgttatggagttgcgctgtacgacccttacgtgacaggcattgtctatggagaggtggctgtagctccagattggactcaaccgagtctgtcggcagacgcaatacgagcaaatggcggcgtagtgccgcccccagaacccattctccctaccgattttaccatccagctttacaaccccgaccaagagatcaaagttcaatatcatacaaaatcgtggaacaaaccagcccggtgggaatttgagatgcctcaaaccacattccgagttccttccgcctcagcgctagaccagactcagatcgatccgtctattgctgacattactccgaaattgaggttcagctggcgcaaggatgggaagctgtcgaaggatttgacatgcctcttacacggcaaaacttcaagaattcccgacactcgctcaaagagccgtgagccagatattacggtcgctctatttcaagggctgaaggagctaactctctacgagcccaacctctaccgcgtcgagatggaagatgccaagggtttggaggtcgtgctcctcttagctgccgttgcaattcgagatattttctttgggcctgccaaggaggctttccatatcacccccggtgggctgaacgaaggtcacaagcaagcagcagtgccaacttcaattacagcgacggccacaccagctagtgatcccagactcgatcggaagaacccacaggcccgaccccctgggccaacaatgaatggaaagccatcgccgcctcgactcagcattcccaactcctcatctccggccccacaagagagaaggcgacaggacgaactcgcaaaacaggaagaggagcgacgaacccaggaggttctcgccgcagaaaaaaaggcacggcgtaagcgggaagcagaagtcgagaaggaaaccagacggctgcagcaattatacggacaagaagaagaacaagcacgaaagcaacgacatactcctgccccatcttccaggccctaccccccaccccgacataccggaccccctcaaccttactcgcaccaatactctcaatcctcagtccaacttaactcccagccagtagcccgtccatcccatcatgccaaccaacgatattcccatggcgcacccaccttcgccaacagcccatacctccaagcaccgggccgcatggatccccgagcccaatcatccacccaccttatgcagcgaccacaacaaccacacccgcaaccccggccacagtcgaccgttgcgtttcaccagcttcctaccagtagcggcgctctcctaacagcatcaaggccgacacctcaagtccagccgaggaagagtttctttgggctccgacgcaacaaggaggaaactactaacaagcttgaaaaaaagcggagttctatgttttaatcttgtataccctggcgttttcgtttttcccgcatcatactttgcatctcggcgtggttgtattttgcccatgagtatctcattgtagttgcacagcgattactttcattacaatgcatggcatcttttgctttacaatccattccagacctagtaaattggcgatagagctgttgtaatctcttggtggttcccgaaggacacggcaggcatggaagtccatagcaaagcagaatgcttggacttatttatgtccgtgtgggatatgaccatgtccaccacctataggattatccgagaggaaggagcactgaatgagtagattatctgatctacgtgcaataatcctacaggcaccaaggaagcgtcggaatcaaatggctattctagtttgagtctagcttgagatccgatacacagactggtaaagtagcttggaattatggcctagcaggaatcggttgttgccctcaaggtcttccaccttttggtgcatcgactctccctcgtcagtgagatcggcaattgcttcctttaggcccctcaatcagtgagttcttagtgtcacaagagctctgtactcgaactgcaatgcgtcgtctcgcttttgcaatctcttgccagcccttagggagccgttcctctcttgcataaacttagtggccccatcggtttcgttcgctattgatctctttgatctctcgttgaaggtcgtgggggtggtgggactatggcaattacagccgtaatgtgggtaaagatcgagaggaggacgaaatcttctcttgcgagcttagctgttgtaccggaaatgtagtcgggatattcttgggaacgggggttttcgggttaatcaatcagagccctgtcgactctgacacgaagtctgaagtgaccagatgaggctttggagtatttcctttgtgcataccaatcgccctgagcgtcgggtttctggttcggaggggtgattggtttcagaaagtcgaagaagcttgagactccgacttctagagctgcaattgtttcttcttgcaacctccattattgcaagacggttctgtgttgtagctctccaccagcctttttccggtccattttctgcactcttttggtttcttctaccatccggccgtcgaagtcatcatctgttttcttgctggcctttttttgatgatcggtgtatgcatatcttcaaggagcttctttcctgagccactcccttagcaatgtgtgtttttgtgctagctgtgtcttcttgtgggtagagttctagcccttgctgcaagctttgaatcagcgaatagttcggacattatcactgttgaggtttgacgacgtaggataaagtgagagaaaggtcaaagcaggtaaggaagatatagaataatacatcttgcatcactcaaagtggccatgatggaagagcggtataggcaggtgcttgacgacgtcaagagagctcactgggggaagaggatatatgtagaaaggaagcatcgggggagtgatgagaagagggaagggggtattcataccttaggatatatatacagagcaagggagtctcggaagagagaaggacttaaagagactgcatatttatttgtccctcaggagatgtgaaggggaagaaccgagagagagaagtgggaatatatccgagaggaagaagatctcggggagaaagaatggacagagggtagagtggaaggaggtgtatatttatagccaaacctgagaagagctcggaagataagggtaggaaattaccaggaaagaagtgagttaaggtgatataagtatatcgagttatatagaaagagaaaggctcagaagtaaccagcgatgactaggaggtgtggagggagggagaatatgtatttatacattagtagaagtgaaagaagagaggtcaaacttcaaaggagagaacaaggaaagagaagtactacatactaaggaagagggatttagactcagtagtagatgaagcattttcttagtcgggaagttcccatcttggtacccaatatctaagtgggtatctcgggtggcactactccgtaggtatgggcttattgatgataacctactccgtactattgcggcgagtaattcggtggatcaatggatcaccagttagggcaactgcgtctgatctgccactgtctcggtgtctatagatatgaaatgacgtcatcttcaagaaagccattgctcggcgatcaataaggtccccggtaagtggagctagtcctaactcggcctcttcgctgatccacccgtggcctatggcgggcttactacggagtgtacggagtatgtacggagtgtgtacctgcagtcccctgtagtctgggccgggcgtctggctgattaccggagtaagaactcggtgtaagaaatcattcgctgtcggtcttgcactcgccgaaattcggagctcgggtctatgcggacaagccacaggtgtggccggcaaccaataggagtgacgtgacggggcgcgggagtgccacgttcgcaagccacgtgctgtcaatcatattctcaaactcaattgagaaagagttgccctttcccagaccaataatcgacaatctcttccccatgactctaacagaatacaggaaagcctcacattcccggacgaaagggatcggcgatgcttgcaagaaattatcgttggccccgacggatgagaactagtgagaactgcgccacatttgctcagccattgccgatgtgagctcatgatgccatactccgtccatggtctgacgatgtggttatgtgaagggctggtagaggcctgctacctctcgtggtagtctgtattctggatacagcagataccttgatcatagcaaaactacccgcaggcgaggcttctccgacggagtagttggccgaccatgagtggcagtgccgttgggagagtttaatcgatctgcagggatattgttcgcaatttataaataggggcggaatgttgggaataccctgcagatctatattttctgggagtgagatgctgcaatatcctgtagttctgagcaattctgaaaagggagaagagatcaatttacagagaccaggaataggatgaattgaaagggtcaattgactatccaattgactaaaaatgtactctgtaggtaaaaaaatgatgtatataacatagatccgatcaggacctgaaacggcttttcttccccgcaggcccaacgtcctagggctagcagcctgtcaatttcccctcctcgaatcaactctacttgcttttactcagctgaactaaacccgcgaaaaatgaaacgtaaaccacatcttccatctgcccccgtggtaatatcttgtcattgagaccattgagaccattgagaccatggtgggagttccgcacagtacaggctgtgccctgtgtcgcgagcgacggatcaaggtcaatatccaccaaagtaaggttcaaggtcctgggctaataaggtccatagtgcgacgaggcagttccagaatgcacccagtgtcagaaatatggccggacctgtccgggctacaggcgaacctttcgttttcaagatgaaggccccaaccttgcgcggcgacatcggtccaacacccgacggaaggggagaagcacattggcaggacccgctacgtcttcaactcgaattaaccaattctcttcacgcggagacccttctgcgactgcagagatagtacgcggcaatgcgattgccctcatgcgccgacaatcctccttgggtggctgggacgaacaattgctggcgcgcaagtccttccgtgccgcgcagccacaattattcctcgacttcatcagcacgtcgtttccaaccttttattttcataacctgttccggtctggcgacacgcccgggttcgccgaaaatctcgtcatgaattatggccaagacgcgtacctcgactccgccgtttgctgcctgagctccgtctatttagcacacttgactcaagacaaggcactcctcaaaataagtcgacaaatgtactcccagtcgctcagggaggttatgcgagccatcccgaaagccgaccatgcaaactctgacaacatgctctgcacatccatcgtccttagtgtcttcgaaatgttcgcgcagaccgcacccgacgcctgggtcgtgcactcggagagcgcaaagcgactaatgataagtcgaggcccagcagcgcacgagtccgggttcggaagatactgctggatagcattccgcgggttcttcatcgcgacggccgtctaccaaggcgagccctgcttcctagaccaagaagaatggcaatcctacgcgacgaaagtcaggaccgaagactgccagaagcccggcgaatggtctgcatacggagaagtatccgacttgatcttcatggagatcgccaaatgcccgcggtatatcagcgagacccgggatctcctctcagtcccgtacgaggctgactccacatccatcgcgaacctcatcacgcgcataagtgatacttcgcagcggctgcgctcgctcgccgcggacctccgctcatgtatcagcgcgcacagtgagcgccagcagggtatcgtccagcgacccggatcctttgtgggccccgtagcagagagcttcccggacaccgccccgtcgctgctgctcaatggagcggagaatatgctagagacgctagagcagctctccgaccgtcttggtgaccggttgtgcttcagttctgtcgaggtttattcgcccgagtcgtcggtcgtcacgccgcctagcagtggtagtgaatattctatatccccctattctgcgacgtcgaggagtttcgctcttccctttcgcatccattcagagcttggacagggtctttctaaaagctctgattcacatgatcaccgtgctgtgagttggttggatcgcatcgcgtcgtcgatgggtgtcctcggcgcaaaggtcctcccgggtgatgatccaagtacttcagtgcgggtggacagctcacctcaagtgtttgaactgcaatagtcaacgatgatgcttgcgttgacatgaaatgtgatacgaaaagatacctgctcctagccggtctaggatgaacttcccctacacaattacgctctactttatatccccaatgtgaacaatgaaactcaggcattcaattttgatcatatcggcgtatatacgtatagatatatcagatgcaatcgcgttctagtaagaaccactttcttaccactaataatccaaagactgctccagcaagcccctcagctcacctctctcagcctccaactccctactcagagtcggcgcgagcataagcacccgctgctgcggaatagtcccatcaaccaatccctccaaatccgcagccttgaagcctagatccttcaatccacgcggctgatcaccaagcttaacaaggaactccgcaatcgcttcgccaagcacctcacccgcactctcgcgcttaacattcgagatatccacaccaaacgcctcagccgcggcaagatggcgatcagggttcgacgccgcggtaaagcggaagacggcgggcgcggtgacagccaccgaaacaccgtgcgggataatagggtgatccacctgatagcccgcatgtttatagccagggttctggctggaaatggggtagctcataccgtggcagagatggacacctgcatttccgaaccccacgccggcgagcgtagccgcgagcagcatctccgactgtgcttcgtggtcatccgggtcgtggactgcgcgcggtaggtacttgactgttgagcgaagggcggcgagggagaagatgtcggagatggggtttgcgccctggtaggcgggccggttgatggggtttgttgggcgtggtgtgcgctcgttgtatgggattgcggtccaggactcgagggagtgacagaggacatcgaggccggaggcggcgtgcacggctgagggcatggtccgagtgttaagtgggtcgcatattccgagggttggcttcagggcccggtgggcaatacccgttttggctttcttggagactaggtcgaagatggctgtgcctgttgtctccgagcctgtgccggctgttgttgagacggcgacgagtgggagcaggggcctgtctactggcaggcctttgcccaatggtgcgttgacgaagtcgaggaagtctgcttcagggaagacggtatataggttcatcagcttcgcggtatcgattacagagccgccgcctgttttcatgttagtttgtgtaccaggagcctaggggttaagggagacataccgacggccaggaaggcatcaggtttatagggcttagcgaacgcgatagcctctttgatacttaatttgaagactcttagtacctataccacaaccacaactgaagctaggcacattgacttacgagctatccttaggctcagtgcgaactttgtcaaagatagtgaactcaatgccctcacgggtcagaccctcaacagcctgcttcatagcatcaagcttggccacattggaatcagtgacgatgcacacccgcttcgcgccgaggttggtaaagtccattccgacctccttagtcgcgccgggtccgaagcgaatgctagacgccgccatctcgaatgcatattccttctcacgcgaggggtcaatcggcgtggacatgcggcgtttcacatggttgagcagagacgaggtttgcttgtggttgtggtggtggctggggttcttgtggcacgggcagttaggtgggtgggagtattgtactgtgcgtagcaagtttagggcacgattggccgctgagggagcgactctgattgcgggagaaaccattctgtgtaattctgtagaatataatcagaagagagtttgggagaagtcaagctgaagtaaaaggtcaagcgactcggaagagaaagggcaaattggggaaaatgcggggaaatgccccggacttctgcccgagatctttttttttgttttgcgcgctctctcttgactcgctgtttactcgctatttactcctctattcggagaatctattcatatcggtctgatatattctctttggtttctccgttttggagaaactcgaatccagtgcatctatatcccatagccgaggttagttacactcaccgattatgacgtctccaacagtatatatccgtctacggatccacgggtgtgcacaataagaatgagtatgtaatcaaacataaaaagtcagatgattgaattgagcagcactatcgtatactagctctcatatccaccaactataacaatcccccaatctcatacccaaattaaaccctcaacctctcagcaaagcgacaagatcaaatcggtcgaagaatcaacagccctaacctgacttccagcaggcggaaccccatcctcccaagaaatcaacggctcggaaggcttaacattcactgggtaacccgcaaatggatcgccaaagacatcagagagatcataccagactttatcctgtctctggcctcgctcccttgtagaggaaaggttgtacgcaaagatcatctgcggagaactggtatacagcccgtcgcggtcggtgctgatcttgattgcgatgccgccagtgtctgcattctcgcggaaaacctcgctgtactcgtcgttcgggaggagagttcgctccggtaggactgtggaagccacagaccagaggtagactgggaacttgcagttgttgtgcactatcgcatggcctaggtttcggtgggtgggtggtggtgtgctgcttggtctcactgagacgaagcttgaggaggggaaggcaccgtaggggatatctctctggccatggttgttgtggattgttgggttcgagagggcgaggctggcgagcgaaaggagggggatgatagttgagaaatacatattgattgattatagagctgttggggtactctttagttatgtcttgcgttagaatcaggaatttggacggctttatatagaatcattcttgttgctgtgtttcaccgcgagcctagttggatctaattcttggcggcaagatgcatataggcagttgctatgaatctaggctcaggggaaattagatgccaagctatgctgtacaccgtagatgtggcgcgaaatgtaggggtgtgaaactaccacaatgtagtagccgaaaagacacatctgtttgtccaacagaaacatatgaagaatgtcaccgtttccccatttagtgcgcatgttgactttgtatccccggagaaagatcggaactcgaggaatgtacaggcctttaattttatattatatgtcgacagggcgagaagaatcaacaaatgggatattctactcatgtctgatcgaagatatggaagaatgtgactggtctactggctccgggtatattaccaaagagaatgagatcaaatccgtatacaaagactatatcgagggattatgctttttcaaggacctttatagtgagttacacccgtggacggcatgacaaactcgcgttaagcaggctgatgcaactatctgaaagtctactcttgatcaaaatagggaatcaaacatcaaaatacaagaccccgtggctagggcaactgtggcgttctagacattcatttctcctgaggaatgtgagctttctataggggagaccacggaaaattcttttgggtttgaaactaccgaggaatgtcagatagaatagacttcagaacaccctgccagagaacacgaattcaaggaacaaaacaaactcagggtagttcatgtggcacgccaaacggtcggtcactcatttgtgatatccccgacgtcatgtccgatgtcccttataagcatcgtgagacagacctaacgttctgtgtagcatacacaaattgatagatgtgacaacatactctgattcaggtcggatgcataggaacatcgctattgggtgtttccgcagccctgtggttcagctagaaagcttaaggaatgacatggctgaatgagatctaaatctaaacaaatatcgacaccctagatgcgtgacaggcttcctgttcttccaattggctgagatcaagacgtgccaagaaaaaaattgtattcaaatatgtgtgacaaaacatctctttagaagaaaaataggtagggcaaggataatttgccatcagaatgaatcgcggacccgcttataacctaagtcatgtggccatgagaccctggtattgtaagccatggttggtggtggttatggagtagtaggcattataggggacatcccggataccgacatactttccgagaccttggtgggaagtggtcgaccggggtcatgctgggtgacgttcttggcggtgcaaatgagagtgttgcaagaagcattctaagtattatggagcatgagtccttgcttgagctgtccggagtgacaaagtcagttggaaatttctgtgaccacagtgaagacttgagtttgaatgatcagcgtaacgatcaagagccgtaggtaaatagcaagatctggaaatcttcctagtgttgagcgttgcgaatcttctcatactcaggcagagcccacttcaccatccattcagattccagattctgctgagcagatggtctattctccggcctgaaggatagcatcgggcgcgatattgagaaaagagcatctcgttcgttcggttcaaaagaaggcataccctcccttattcgcgcttgctgcacgctcgtttcaaagttatcctcccatgagggatattgggattggggtcggtctactggttctccatccttgagggatttttctcgatgtgctttccacgtttacagtcattcgtttggtagcggacccaacatatcgatttgctggcgagtcatatcatcttcgtccgtaaaaaagccttcaaatagcgatctttgggcaatgatctcccagatagtgcatgcaagtgtccagatgtcggacgaaaaggtaagtggcttagttatctcaaagtaagtctccgggggtcggtaatattccattctttccacaccttcaatgggctcatacaagacatggcttgtattcacggttgaatcggtcaatttgaacgtagtgagagaaagtgcacggtgttgaggatgaagatatagcaggctcgcctttttaggaatgagacgatgtgagaaagacgtaaacgaatgtaggggcctaaagagcaaacaggactttctcataattttcgtatcgcgatcaaggccatttgatattgaatcgaatttagtgcattttctagcttattcgccttgtctgtccacttggtacgacatacaaaggaggtgaagaggtgatgttgggtctggggtgactttcttccggccctgatcccaataacgtccgtgcgtctggcacggtactcagacacgtctgtctatgtctcgctggacagtaaatactaaaactgatactactacacactatatttcatgtctcatctactagattttcaggctcaaacaaaataattatctcttgacgttgcaacttatttgcccactaaacgcatgcaaaccccaacaactacccctatgatggctccaacaacaagccctacagctatccacacgatgtaatacttgatcactcgtcgcttagagccgctatgccactctgccatcacatctttcatagttacaatgggtcgttttccacggaaatcacggggctcctgcagatccatggaatgtattggatgtgtgctcgtgtgagcttgctcgggtatcgttggtgccatgatgtcaaggctgtggtaatttggtcttgaccgtaaacctcaatcttattgatagtcaataaatatttttagaggcctcagcaatttgctttcgattgaaactgacatgttttcttcgcgaaatttggtgtcgtctgtttggacgcgtgccggaatcacggaggataagcgatcggaaaagtcccttagaacaaaccccgtaatttgtagcctctagatggaatgaatcacaacttcttagtctaatcatagtcatagatcttgcatctttacgtaccttgctgacttgattcaaacgttgaactacttagaccaacgtgttgcaggagggggttggggggagaagaaattgttagactccgtaatcaccccaatttatgatttatatgctgtagtaattcatgagacccttgaatagctaaacgagttaggcggctaatgctaaattaaccgggacccttgtaaactttaaaaaggatcgacacggcaattggttcgatcgagacgtgggggccgggaagtggatcctctccacagcgggaacccgggtgatgcccaatggaattcatggggccaagtcggttattaaaatgagattttcttcgcctactcataatttgtaacacaccaggcagaaacccctttcaactacgtacttcagagagggtcaaaaaagaatttccatctcctcacttgatatctcatcgccggttacctcgtcgtatcacaaagctacttggctagtggacctataagctaatgtcgcatggtcgactcagtcgggacacagataaccctcgcatatggtcaagccaagattagctgctagtcattttcaatctccgatttactctgagaatatccatttacgcgacgcgaccatggattggttgacaaagttgttcacgggaaaggactcggcgaaaacagaacaaaaagcgcaaaagcggaggagcaaagtacacagccgaagggttcgtgcacaggaaaaggagctccgacgtgggaaggataagggtactgtcaaaaaggcgagctttttctggggatcgccaggtcagacataccagagtaatgttcgtggtccgggtgaaggaatttgaatgggttcggagacaaatctgtgaataaatgaggcgagataaagaagcttcgacttcgtggctgctgaattcgttaatggaaatttctatccgtctgttggacttggctagataatgcctagatgtgtctgatggattcattgacatggacgtagtattattgagaagggaatgagaaatcaacagcggaaattgggactcagtcttggcgtttattggccttaggccgctatatgtatgccttaacatttcccgtgaccacaacaacatcttcccagctcaacctactctatactcttttgagggtgtgatattagattaatatcactcgattttatttctaatggggttagacaaaaccagctatgcttggtgcaaagtcttctaagtgagagacatcgaaatacatggttttgtgggaatgagttgaagctaataaactacagggtttcagaatttgaagcattcatttactcatttcacttgtgctttcctgcctttgagatctgagcctagtatttcaatatgtcgacggtcttaccacatctcgtcggctctgtagacgtccaagcgcatcccctccgtccatgtcaaatttgctgaagaacaacttcgtggtatcatgttcccagtcatgactatgtgaagtgtcgggctagcttggaatttaccgataagcatcacagcgagcggacatgctccactattctgttgtaaatcggcgataacggacaattgttctagctcttgatgatgcaggtactcatctggtggcacccggcgaattcataaccgatgtttgtatcaatcctctgatgaagaagaataacgcctcccgctatcccccgtatcggtcgcctcaagttctgattcctttatcatgcacctcatctcttttgccctcggaatttgggtcgtaactcggaaactgcagctcggatttagaagtattggacttactggccatctggcaatggtcagactgtgtggcaatcggtagacagtctgaaaattccactccaattggctacggagatttcagttgcaatctcgcatttacagactacaagagctccaggtgttcttgtaagggtaacaaatgttacgatcatgagagatcggtgggtctctcttgcctgcgtgggaaggagaacgctccttcctattaggtacatttgtcactttcctttattctcttgtttgttctttcctttccaaggttgtttacactttagctaagcgagacgttcgacttttgcatcgtttgcattagggccaggtatataaacaggctgatccccacttctgcacttacttcttccctctctcttcatcattttgaatcaaccacatcacagcgcaatccatccaacttgcctgccacctgtcgtgtccatcatccatcacatgacttgtttgttcttactatcctttttttcctcataacttacattcatccttcagacaacccagccatatcacaagcatccattcaaggcacctatcatgttcatcatccatcaaacatctcagccacatcatagtgcatcccgtcaacgtgcctagcatctattgagctcatcattcatcacatgacttgtctgttcttactacctcttttttatcgtctacttacattcatccttcaggcatcccaaccacatcgcaagcatccattcatggcatctgtcatgttcttcatctatcaaataactcagccatatcacagtgcatcccttcaacgtgcctgccattatcgtgttcattgtctatcatttgacttgtaagttcttgctgtctcttcttttcatatacttacattcatcctttagataacccaaccatatcgcaaacatcccttcatgacatctgtcgtattcatcatccttcacacaaccaaaccacattctccttccatcttccatcttccactttatgaggtttgtttcttatctgtgttatcgcctattcttcatcttccctcatcgcattctatgacttggttagcacctgatgacacggggctaactgtactagataccacatccactgaatcacatccagccttaccgtgacaggtttcggcttctcgacaatcgtcaggctgcaagaacagcaaacacaaacaaaacaaaaaaaaaaacaaaaacaaaacaaaaagaaaaacaaaagaaaacaaaagaaaacaaacacaaaagaaaataccttggacaatttcaatcaacaacgttcaaacagccacttcaagcatccccttcaagcatccccttcaagcatccccttcaaacaaccatccccttcagcatcaacttcaaacaacattcaatcaagcatccccttcaagcatctccttcaaccaacattcaatcaaccatccacttcaaacaatcacttcaatcaaccatccccttcagcatcaacttcaatcaaccatccccttcagcatcaacttcaatcagccatcaaacaaccatgcacattcaatcaactatccacattcgactactacaatgcttcgaccttaaagaggaggaatgaaaagaaacggtcttggtcgacagagtctccgcaggagtgtctctgaaggagacttctcgtcgggaagaggttacagcgtgtacccatttaaaggagactctcaagaccgtttgctgtggtggtaaaaaaaaaatggtcgcctcgacaagcaagcatcaacattcaaccatccacttcaatcaaccatccaaatccaagcgtctatatccaagttccacttcaaccatctaccttcaagcaaacatccacattcaatcaatcacatctaatcaatcacttccaagcatccacttccaagcatccacttccaaattctactgcagtcaataatccacttcaaccaatcatccaaattccatttcaaccatccaccttcaatcaaccatttcaagtatcctcgctcagccttactgtgacgggcttaggcagcaaacacaaaagcaaaagcaaaaaaagaaaaaaaaaagaaagacaaaagaaaacacgtcgaatcatttcaatcaaccacatccaatcaaccacatccaatcaaccacatccaatcaaccacatccaaccacatccaagaaccacatccaagaaccacatccaagaaccacatccaagaaccacatccaagaaccacatccaagaaccacatccaagaaccacatccaagaaccacatccaagaaccacatcaatcaatcttcaatcaatcttcaatcaagcatccacacttattcaaccacttgcactgagaaatgataatctaaaattctacacgtctccaacctagagctttttccaagctgatataatccctggttatacatagaaaagctgtttgcacggtttatgctctttaccaccttcgtatattgtcgagtattctagctataacaccgagaaggtctaaaaatagatatctaatagcgtagactcccaccagaggacctggggaactgcgcgtatggtggatgaacctgtagagcgagcagagactgatattctatttctagataaattcatcaaaagaatagacgtgaataccttagtgactggtcaaggcatgttagagacaaagaaacagtgttctgctcatattcttctcctcaaacatggcatgcgtgtttcagatatttctttgacctatgaatcggtctttggccttgataccaaagacgaacgcacaacaaagaccatctcgtctagttcgaatccccataaacgccacctccggttctccgcaaacacaggcactctgctcatcgagaggacctccagtcttcaggacaatacaaaatgacctagcaagaaatatgcttaaaaccaaggtgacatcgacatccaaagatgttgcgcagtcctacccctgtatagtcaacgaccttggaccatatactatgtagtggcgtcgcaaattactttttaggaattgaatcagccaaataagacaaggatagagataatttatgtgctgacgtgaattgcaaattacataactccttccatcttcttcatctctttttgtgatgccttgcatttcgtctctttcctcgacatctctcagtcgcaaactccccacccaattcgactcttgtttactctccacaccactccccagtaacacacgaattgacatgaatacagcccacgatggctaccgatcaaatttccaagcctaccgagcccgatgccctgatcctcgaagcttggggccagggtctgatggttggaagtctactcattatggccgctatcactcttgccaatatgaggtcgcatattctcctgcacaagctgatcctcgccgaggtacggtggaagcgaaaagactaactctgtaagttatgttctcaacaggacttggctgattatcggatcgataatagcttgtcctagctatggctcatggtactttcatcttccccaacgagccggtctacggctggtatctatctgtgaccgcggtcggtctcaacatctcctgggctctgcataatgttatcgcctggatgaagaaccgtccattcctgtcgcgaaaggtctcaatcatctacattaccactgttgttctctgctggccttattggggtctggagatctatgccaacttcacatacttcaacaatatcaacaaggtcttcttgaagaccagaccaatggagccattatttcggttggtcatttcaattcctcgcaaatatcgaatgcagctgcttcataactgagtcctccactctaacatgatctaccaacagcgatccgtggtggatcttcacaacagccagtctattctggactatcaagcgcgaatacaacttcggaatatgggagctaatagtagtcagcccccgcttcggactcatgctggtagccatgtgtctgtcgattattttcataatcgttgatacctgcagcgtgttgaaagtcttctccagcatactcccaacaggcgtcgagccgttctggaaagtaagatcccatcgtccgatcttcctttgtcacaccaccctaaccatcccagctatcttttatcttcaaatgtctctgcgacacggtcatcctcgacgacttcaagactgccctcgataacttgcgcgttcactggatgcgcaagaagaacagccagttgttcggtagcccgctgtccaccccgacctctactccagactctagccctcgtgcggatagaatacgcagggatattgagacttgcgattcacctacgacccctacaacccctacccctacgaagagaccttacacccgtgcggtggatgttcctgcgcggagggtgcgtgacgatgaggttgttttctattagccggacccttcggcttcaaattgtgcgttgagaatggtgttcggggcttttagtctggtttcttgacctcggcggttctgaggttgttacgacatacccggacggatagactgaagttattgcgattttacatcgatttgcctgaggagagcgatttatttcaaaagaaaaaaaaaaggagaagcctcggggtcagatagttaatgaaacatacaaatcgtctgcttttctattagtagacattctgccataggtgagatctgcaatacataaaccggagaattgattcggagaattagcatgtcttcatgcagtgtcacatctataagttcttttcctggtctgactagttaccaattatgaccaatgataaacggtgcttacgctttagcgtactctatttatccgagaatgtctctgcttaaaggttggatggaggttgtatacacatcattgaccacttatatctggtattttatctggattggagaacaagctggcaatgcagaaatttacacactcgaggatagtacatcccacgcatcactcggagaattgacggattcagatgacacgacatcccacgcatcctcaatactacaattcggactcgagtctcgaatataaatatagccatttcgcccgtataatacccagactccaatctcttactccatactccatccaatatcccctttgcaacttaacatccaagtaataatggactccctcaacattccacagacccaaacagtcgctctcgtccgttcactgggtgggcaagtcgaattcaaaacagactaccccgtgccaatcccgggacgcaacgaagtcctcgccaaagtgctctacactggcgtctgccagagtggtatgtatagtgtcatgtaacccgaccgacatctaacgggatgttctctcaacaagaccttcctaacaaaccaacagatctacacaccaaatccggtaccgcggcaggaccagacggcaacccgataacaaatatcaagctgccacacgtgggcggccacgaaggcatcggccgagtggtcgcgcttggaccggatatcacgcacgccgcgggtctgaaagttggcgggctggtcgggatcaggttcgcgagccgcatctgtcggcggtgcgagttctgtcttgcgggtacggagcagtactgcgttgagagtacaaaccatcttcaccacgaggatggctctttccagcagtacatcgctctcgatgcggattacttgacgattctgcctgatgatgttgatccgaaggtcatgggaccggtgctttgtgcgggtttgacggcttataaggtgggttggggattttgctttcgtggtctggggttaatttgtggttgattaggccgtcttgaacgcgaatgttcgtcctgggaattggttagtggtcgttggagctggaggtggccttgggcatttggctggtatgtgttcttttttgtggtactctggagatacgttgcaatccactgacattctccagttcaatatgcaagagctcaaggggctttggtaattggcgtcgacactggtcctggtaaggaagactttgtcaaaggtctcggcgcgcaggaatttatcgactttgccaccgaagaccctgtaaagagggtgcaacagattactgggttgggtgcacatgctgctgtggtgacagcaggtaatgcaaaggcgtttgcatatgcctgtgatatgctccgggttggcggtactttgagttgtgttggtattcccccgggaagaccgagcttggagactcctatctgcacgattgtgatcaagggcctcaagatcacgggtaatctggtgggatcgctgaaggaatgtatggaggctgttgatatggtacggcgtggtattgttaaacctgtggtcaaagtccgaccgttcaaggatttgcctgaggtatatgaggagatgaggaagggtgatatttcagggcgcatcgttcttcaaattgcagaatgatcccgcgaaaactttattgaaattcagattatctgagaattctgttgttgaagccaatccaaaaaatccgatgtcaagttcctttcatcgggctcgctgtttggtgtgtatcctggaatctgagcctgaccaccaggtccattttcgcccgagtgaaggccagaatcttcctccccgattgtcaacaggcgagctggagctgcaactagagcttcagcggttttagcacgaaggattgacttcaacatggtatcctgctcgagaaagggatcaatcttctggtataatgcatgcaaaaagtcctgtggtcctagttcaagccgagaacttattttgtgtgaagacaaaagaaccgtatccgccagggagttggcaacttcaaagcacttcaataactgtaacgagccattagccatggcttgtgtttctgtatatcaaggctactagcctggtctcgtcccaatggtagcaaatccgtctcgctgaaaccccgcaaggcctggagtaaggcgcggccaacttgcgctggaaatccaaatgccaagacgggttcgcacgctgaagaagatagcaagttcatgttgagtgcctcctgccagagaatagtcctcatccactcccgtgtaatgtggtagtctgccgttcgggtcgagacatgattggccatgctgaagcatagtgaggcaaccttgacctcggtgttggtcagatgtgtagccatgatgatcccaggacgcgagttgcgccgtactgagatctggtcaaacgcaataaagagcttgacgagttctagcaacccttgggcatgaacatcagcattcatatccccctccaaatgtatcaatacaggggggtcaatataagacggagagagacccaggtgcaatgaataacctctgtgatagttagtaatttactctgcgaaattgaattctctagcctacctctccgatacccaaagcagcggaaataccaaggcctggtttgaaatcacctcatcttcctcgtgtaaaatatcctcattcaatcgcagaatacgagctccggtcatggcctcctggatgaacatcattgacgaatttcgttggttgaccttggcgtggtacacatgcaaaaagaaagacaccagaacgcttctgagatccagatttgctccatggctgtcgcaacttgtacgcattcgcaagcaagcctgggccattagcgtgctatctactttctgagatccatataccgagggatcaagatgcaactgagccatcgtcgcggcacagagggccatgatgagacaggaagtgttcccagcattggagtcaactttctctgggtatatatcctctactcttctcaaaagagcttctgcgttgactacaggccagacgctgtatgaatattgctggtacagacggatcaccgacgcaaagactgtctttgggatgcaatggaggctgcaggctgtggcggatgaagagatggtatcattgctaccgttttgtatgtatgtatcttcttcaacattctgctgaatctctgtggattgaatctccggaaggtcggtctctcgatggcatactctgcgagatttcgggcccctcctgtgggcaggcctcaggtacgtacagcgcacccgctttgctgcaccgcggcaggtatcgcagggccatgaaccgctgcatttcactttgcgggagatacagatatcgcaggctcgtttgggtggcataaggagctggatttggaagtgtcatgaagaaagatgtcaccttgccaagcgtccaaaccatatgtacaatgcggggaaacattggatcttttcggcacctttgccggtatctgctctcggaattagtttttattatggcctagtggtaaaataccagttcataggtgggctcggccacccctgagcccacctgccttctggtaaattacgctgcacggatttcgtcagggtcttttatgttggagaggttacgtgacggcgtattgggagcgctaaacccaaaatggcaagactgacctgatacagtaattcacaggtccgtcgtttagttacaaagtagaaatagcctttgctcccccgaattaccctctgtcctcaaacttttcttcatttacacacatactccgtacctaagtaccaaatcaaacctccaaccacatcaatcatggctctttccgcacccagcacagacgtgagtctcccatgctatgctcccaacaagccccagaccgaaacctaatcaagaaacagccgcaagtcctcatcacccaagaatcaagcgcggaacaaatcttccacagcttcacagcagaaaccgcttggcagcttggaaatgcactaagggaccgaatcctccgcctcccggacggacagcgccagccggccctgatctccattacgctcaccggcggagccccgcaccatgtggtgtttcaggctgtgaccgagagcggcacgatcccggacaatgagaactgggtgcgacggaagcgcaatactgtgctccggtggggtctttcgagctggactatgagacagaagactgttagtgggcttgcggctaatgcgtccgccgaccagattgaggctgcttttgtgaagaaatatgccgttccaagtgctactgggggtgctgttgcagatgagtatgctatccatggaggtggctacccgattcgcgtgcgtggcgttgatggcgttattggtgtcgttgtcgttagtgggctgaagcaggaggatgaccatcaggttgtggctgagactattcaggcgttcgtggctcagcaagcaaaatagatgtcgaggtatgccggtacacgatatatttcaatcaaataaatttatataagcctgttaataggcactatctataataaaagaatgcgaggtatcatttgtattgtattcttagccggcattaatcaaccaggcctgaaagttggagacagtgccccgtgtaaattcgaacacaaaaaggggactcaagcaaaagaaaaaaagtggaactccatgaataatgcctcaaagataattttacagttcgtcgtggtcaaggggctcgtcatcctcatcaggaggagaagcagagccgtacagcttgctggtgatggggtaagccacactggaaagctgctccttctgctcctcaaagtcctccatggtagcggtggcagcgttgtcctcgagccagtcgttgacttccttaacggcgtcgaggatggactgcttgtcatcctcatcgatctggccacccagaccgttctcatcgttgacctggttcttcaggctgaaggcatagttctccaggctgttacgggcctcgatcttgcccttgatggccttatcctcctcggcatactgctcggcctcctggaccatgcggtcgatctcctcctgggagagacgacccttgtcgttggtgatagtgatagactcggccttgccggtgcccttgtcggaagcgctgaccttgaggattccattggcatcgaggtcgaaggcgacctcgatctgaggaacaccacgcggcgcgggggggatgttggtaagctcgaacttgccgagcatgttgttatccttggtcatcgagcgctcaccctcgaacacctggatcaagacagtgggctggttatcggcggcagtcgagaagatctgcgacttgcgggtaggaatgacagtgttgcggggaatgagcttggtcatgacaccgccagtggtctcaataccgagagtgagggggttgacatccatgagaacaacatcgaccatggagtcatcgccggaaagaataccaccctggacggcggcaccgaaggcaacggcctcatcggggttgattcccttgctggccttcttaccagcgaagaactcctcgagaagagcctggaccttaggaatacgggtagaaccaccaacaagaacgatgtcatcaacctcggacttcttaaccttggcatccttcagaacctgctcaacaggcttgagggtcttcttgaacagatcaacgttaagctcctcgaacttagcgcgggtaagagtctcagagaaatcctcgccgttgtggaaggcctcaatttcaatgcgagtggacatctgggaagacagagtacgcttggccttctcaacctcgcgcttcagcttacccatagccttaagatccttcttgacatcggtgttgttcttcttgttgtactgcttgacgaagtactccatgacacggtggtcgaaatcctcaccaccaaggtgagtgtcaccagcggtagcgagaacctcgaaaacgccgttgtcaatagaaagaagagacacatcgaaggtaccaccaccaagatcgtaaacaatgacctggcgctcatcaccggtcttatcaagaccgtaggcgatagcggcggcggtgggctcgttgacaacacgaaggacgttgagaccggcaatggtaccggcatccttggtggcctgacgctgggcgtcgctgaagtatgcggggacggtaacaacggcgtgggtgacagtcttacccaagaagctctcggcgatctccttcatcttgccgaggatcatggcggaaatctcctcaggggtgaaggtcttggggacctggttgacgtcgaccttgacttggggcttgccatccttcttgacgaccttgaaggggtagttcttgatatccttctgaatatccttgtcgtcaaacttgcgaccaatcatacgcctgcaattcgttagtgctgggttcttgctgtgacaggtgtaatggaagcttacttaatatcgaagatggtgcgctcggggttggcggcgtattgattcttggcggcgtcaccaacgaggcgctcctcatcggtgaaagcaacgtaagacggggtaatacggtttccttggtcgttgacaagaatctcgaccttgccattctgcatcacaccaacacaactacactcaaagttagcaacctgtcacattgaacatgaacaatttccagactgaggcaacatacgagtaggtggttcccaaatcaataccaataacactgccgtagctctcaggggagttctcctcctgggcgttggcggtgtttccaaagaaggccaaaggcgcaacgagcacaaagagaagatagaagatggtggtccaagcgaaaggcttagacgcgccatcgcgtgcggataggcgagccattgtgagaggtgtatgtataggtatgtggatcgagatttttcaacacaaagacaaagaagctgttgctatgaaagctccgcgcgtgccgctctaaacagctgcgcagacgagtaaacacaaggcgtgtttgactctatgaacccttatgttagtcgatggtatgtgggaaagggacccagggcgaagtgagggaatggtagaatggttaggagaagaatcgaagaaagaggacttcttgtacgcggatacggcccagcggccatgctggccttttcccagttcaggtcacttctcgtgctctgattggctggctggcgtccggcagtggctgactcagaaactgccacatagacacaccgccttctttaataggccctgaactgcctaaaatagtctagtggcaggggtctatccacgaactgctcagggtttccaccaatcaacgactgccagatgatcgaacttgctagaaggggccaaaggtttgccccttcgggagttctagtcactgctactgaccacgtgttactttatggttctatgctacattacaacagcctaattgtgtgtcgatcaattgatgataacaagtggcatctcaatggagagaccaggtgaggtatgtcgtatccccgtactgcgggcctagatttgggccggggatctcccgagtaggtgggcgtggcacaaagcacccaccatgccctgggtatagagctttccgagtctaactctaatggcactaccagtgatacacaatcgaataattactcaatgattgagcttaaatctttctatagtagtatccgaaatcgtattcaagacataatcaccagctggcgagctctaaatcgaatattattctgtgatatatatattttttcagtgtcttactctagatgaacaataatgtgccaccgacgacgagaaattgtggcatatcacgaataagatggatttcgattaactcaacttattccaataaaccagcagccactgttgagcctcccgcgcgcaggacaatcctggtcggtgcttctagaggaacagcttgatccatttcaaccacaacacgcgccacgacacccggtcccacaatcttagggcgtttcttgatagctgctcctgacgctttgtccagagaggcgaccagcttgctgatgcggcccggtacatgttgacggccacggtggacatccacttgcatgggcatcaggtgttcgaaggccagaaccttggcggtgaaagaagtgatggtaggaatgggagaggagggacggcagacaacgtcaccggaacggaggtgaatagggtcgatattggcgatgtttaaaacgacgttttgacctgccacggcccagtcacttggttcgctgtccacctccaaactgcgcactgttgctgtttcaccactaggcatgatcaggatatggtcgcccatctgcaaactaccggcatcaatacggccagagatggaaagcggactttgcacgccacctcggaagacatcaccaatcgtcatacgcaaaggcttttcgagggcgtgtgtgtatggctccgacgtttccagctcttcgatcaatgtgcgacctgtgtaccaggatgcatgagggtcgtcagtccggcgagaaatgttgtctcccagagaccctgagcacggcacaaatgaaatgttgctgtcttggaagcccgcagttgtcaagaacgcggagatctgctgttcaatctcctcgaatcgttcatgatcccattgcacggtatccatcttgttcacggccaccacaatcttttgaacgcccatactgcgcaccaacagagcgtgttccttagtctgacccttcaaccccgactcaaaattgcctacactggaatcgatgaccagaacagcgaagtctgcctgactggcaccagcgatcatgttcgggacaaagtcacggtgacctggtgcatccacaatggtaaaggctgtcttatcagtctcaaactggttggtggcgatatctattgtcacgcctcgtgctctctcctcagacccttggtccatgacccaggctagcgcgaatgagcccttgccgatcttctcggcctctcgccgatacctatctagtgtccgttggtcgatagcaccttgatctgctaacaaccgtcccatgagagtgctctttccggcatcaacatgacctatattggatatgagtcagtccagggcctcaccttgttgccagtggagatcgacttaccaataaccacaaagtttgcggaccgcttgcgggtggacttcttatactctgatataacatcaagattcttgctcttgactgtcactttatcctccactgagagatccttcatgccacctgccagatcagactggcctttcttcaccgctgccgatttcgatgcggctgatttcgatttcatacctacatattattaggcaaatgcctttaaaccttcctgcggatcgccaaacctttcgctgtgttctgtgcattgagaacgacatcgtcggggctgggcgctgcaaagtcaaaaggttcagcatgatcctgtccatagatcctcaacaggtctgaactgttggagtgtaagtggctgggctcagctgctgtcgggcccgttgctgcgccaacgatagtgctggcaaatgttgagggtgaggctcgaatagtaggcagtgtttgctgggatactggttcctctttcgcttcaagcacctcccgttgcgttgattccgaagccttagacaccgatggccttctgttctcggaatcgggctgcttcgatatagaatgcggtgagcttggggttgcgacatgacggagagatccagggccctctgaagcttttggtgtcgacctcccgctagctgcaagtctgtcacgaagggagcgcgatacacccgaatgatcaagcgaggacgtcttaggttgttcaggtttaggagttgacgaagtcgaagtctccggtggggatggtgttttctcggcctctttcttcttccgggctgcagctagggcggccaatttggaaggttttccaccattttccggtgcgcctcccaagagccccaaacgtggaaaaagcggctcaatcaggatatccgattttcgatgagagggaacattgagccagggacaatcgcgaaagaaatcggcagccgaaaagtgtgctgtagaaggaggagcagggtatgctggcactggaagacctgttagaacattgttcaagcttctatggtattagtttcgagtctctatatatcacatggaatgtatttgcaccagatacatacagtttcattcgcaaggaatagcagcactcctgatcgggacgcgcagaatatcttgtgccccaaagcccgagcccagcgacgacactttaggataacaattaccccatgaacactgcttacctgattgaatcttcgatttctgcagcttcgtagcctccttctctctctttcctgcatgcagaacttcggttagctaaatttgacaacaaacaatcgaacccagagacccgtgataggtaatatgatgtgatatgcagtatctgcgcaaattgaacatacctctcaaatagttgaccgatttctcaatatcattgtagtagtgccataatgcgtcttggacttctcctttcgtggcggtcactgagggttgcccggcaccgagctgttgcaaaacagcggctgtacactgttgcaagaactcctgttcctctgggtcagcgggtgcatcctcgtcatagaaatcgtcatcgtcgtaatcgatatccttaatacggtgtcgcgacattgcggcgtaaggaggtggggtaataaatgaggggtttgtaagtgacgaagatggtcaattgagttgagttgaccgccttccgcacggttgctgagtttattgggtttatatagcactactgtaccgccttcttatacgggcataccacccgttgttttccaactcccgacttggtaggaaattaaactgccggcagaacatgggctacgtcatgtcatcatccatggatccatgccttcaattggctctcatttctaatctgaagacaacatagctttgacatatacattgtaacattaatgtcgaatgcttcaggtccagcttagtctatccttgggctagaatctttaattacaatacatattcaactgtccagcttcttatacaccctttcattcggtacttttctttagaaatgcaatatctgtaagatcaatagtgtcatcttttatccgaatagcttcataaaactaaagcatagcagcggtatcatgtggcagacctttactctatggctgagggcgggtgtgtagctagtaatttgaaagtgtgtgtatagtaagtctcgtatatccttgtagtctaaaaaagctacattatagttacctacgtatccatacgctgagtttgtcatagttatctaactttcgcgacacgcaggaagccgaaagagtcaaaacagagtgaaaaaaaagtaataatgttcatctatcgaagtggactgccaaaaaagtcacccgtaccaggcccagaaaagctcccattactcggggtcaaggcaatggatcgccggaaagcctggcgtggggtggtaggggcactgggggatccagtgatgggaacggccgatgttgtggtgactgggaccacggaccgtgtgtcaggagtgctaggagtgttgcgaccgctgtcattctgcatggtgacagcggtgccaggtcgagagagaacggcgacagtgcctccattcttaggaggtgggcggaatcctagcttcgagccttcgcggaagatctcttcaagcatttgcgagacaatacctgcatcctcgtattcctggaattttttccagagacgtaaagccatgcgagcatcctcgatcgaatcatgaccttgtacggtttcgggtgagggttcctcttgtatatgctccttgaagacagcccaggccaggtacctgagactgagacgccggttcttcccggggtggaagaagaggtactgtgtgtccacggtttgtgccttgggcacttgaatgttgattttgcggaaatcagaagctagaccgtgaccaacaaatatacagccgaggttgagaagcagccaaagcttcttgtaagcaaccttgagtgggacaagattgtgttcactggttcgcggatccaagtcaccaggcttgatgccggaatattgggtcacatagtccacaattggctcacggatggtaatatagtcatcaatgaaggggactccttcatgaacacccacaccgcgcaagacggaaacacgggccagcccgctcttgttggggcgtaccatttcctgtgatccgtctgctttgacgtcaatctcggctttttctagatcaacaaactcggtatccaatgcgacaggtgtcccgggctttggcatttcgtcctcagtgagagtttgacacgattcaaccggacggccgccactagaacaagacgactgttagtatttctattttcaagcttattaatgtgcaaaaacttacttcaaagaccactcgcggaatagcagcgttttgtcgagaaggttcttccaagagtcatctacgacatggcgtgggtctctcacttggtaagccagcacgcaaggttgtttccaaggctgcgtaaatcggagcgcttcatctctctcgacctccgtgactaaaaagtcattgaacaggtgccatttgccttgttcttcagactcagcacccgaaatggaaacattgacgaaagacaccaaatgggccttttgatgttccgggatgtcaatttctgcaactaagccaatcagatcatatactgcgagcccgggtgtttgattttggattcggaggcgaagatcatcaccctcaaagcacatcacctgtccactagcatcaacgagaattccaacggcgtcgggcaaccaccctgggattgcccaaagccgacggccgannnnnnnnnnnnnnnnnnnnnnnnnnnnnnnnnnnnnnnnnnnnnnnnnnnnnnnnnnnnnnnnnnnnnnnnnnnnnnnnnnnnnnnnnnnnnnnnnnnnnnnnnnnnnnnnnnnnnnnnnnnnnnnnnnnnnnnnnnnnnnnnnnggtggcccgaggggcgacggcagagagggttggtcagagcggcattgaggacgagaatcaaaggcatacggtggatggtcttgcgaatggtcacttgctggtagcgacgacaataattgcaccatcctcggttttgtgtctctcgctcgatacttgcacgtaggatattggagaagcggaaaagcggattccgtcgtgcgtgtttcatgtcgatattcgggtaaatcagttcattggcgagtgaatttccagggcgcacaatttcgttctggcagaacatgcatcgaatagactcggacgcaatggtggctaagcgctgatcgagctcctcagaattaggctgaatcatccggaagtcttgagctatttgagtcaagaaaaagcgattgacagcttggatcgcagttgagagagatttgttggtaaggttctcttccaagaggcccagatttgaggcttctcggaaactgctgaatgtcttgagaaggttggtagcctgacaattctgcccgcttgccttctcaagcatgtcgaacaaatagcccagttcacacaagagacagtgttcaaaaatgcacgatccagctgcatgattcaaagcgagatttcgaaaaagtgggatgaatttgaaaagctggagaagagaattagtaaaagagttggcgatgtgagtctcaagtccggagaatgaggttttgttgtagaacctgtagcaaaggtgagcgaagggcagcaaatgaataagggaaggacatacctgaaatcaaagtcatcgacaccgaatcggctgtatttgatctctacgttgctgtatttgagtaatggatcgtcatcgctctctccgttgatcttcgcccctgctaatgcctctgcagtatcgctaaccaagccatccgacttgctataatctcgagccttctcactcagaaactttggggcaataagagctggctctgccatggtcaatgcacgagtgttttctatttggtatcgacgagtctttctcgggtttggagcatgatgtcccatctctgcggggcgtaaatatggcaacatggactgatccagcggagccgccggactgccaacctcaaaaagcaaatggcttggccacgccgaaaagagacgttcgtggtaataaggcatcccaactatgttcaacggagattcggaagaccactctacttgaggaggccgggtgggaacctcggcaaattccgtctccttgctcaattcattgaaatgaaccttagtcggtgagccccataggtgaatggagcattcggcatcgttaatagccaatgcttctcctgatggtgacaggtcaataccgagcacaagtgacacattggcttgtctcaagttgaccgaattgggattcatgagatctatcacttggagttgacctgtttgggaagccacgaagctcgtggtgtgaagtttgggatgcatgcgtacgtatgctgctccagcatggaacggaatgggaggcagcggtgtcaaggttttcaagtcataaacgttggccagaggatccacgattggggacccgagatggcggaccgagaagccacaggtgaccagaaggtcattccgcgcatccatgtcattaacacctgttccatgagctttccatgacttgacaacgctgaagtctgagagactgagagcattgactgatccggtatctgttgcagcacaaagatatcgactctttttcataattgtgtagccgtgctcggtgggcagcttctcgacaattgtgcccttgtcaatgtctaccgtgaacatcacgcgctgagaacctgcaacaaggattcgattggtctgggcggtgaaactcatacagcgaaggtcgaccatctcatcgtgggtaaggtgccactgcgtcaagccccgtcgagtaatcatgtgcacactctttgaggacaacgaaatcacacctcgttcgtgaaatattatctgctgtactgcaccttcagagactggatgggctcgaacagaggtataacgttgcaattctggtccataaaaggaagagaccctgccctagcgaatcgaacacaatcatcagcatcccgcctcggaaatcggcccgacatcaacactcacatattcattgcctgtccataaaagttccatcatgtcgtcaaatgccgtcgctgttgccacagtgggcatggcatggggactcggcggcggcattggaatacgcgacagctcatcccagtcggcctccatgcttacggttgcctctgcggtccaaccccagtaccgtaattatattgtgtgttcggtcttgttactctcggtatgccggtctgatgggcctggtgtaaactgctgtctttacccacgtgggaacacggcgagtgtgggcatcgttcggcgcgagggacgcgattgcggggaagctatcagacgattcggcggtggggttttgacacggtgagaggtttagagttaaaagggcattacacttgacaattgaggatcggctcgaaatgcctgacacgatgaacaaggaacaatcggactccaactactgtgtatgttgccggcgaagaacaggaacggtgagattggtttaatcacgtgatgaccgacaagattacaagtcaacacgagagcgaagatcagctagttagagcaatgattacatgcgaagaagtagtttttttatttcttccaagaacagaagcatgggaatagagccatcagttagctctcattggaagagaagtgggttatatgtatcgaatcctgaagcaaacaactggcccaaaatcaccaacaaagaaccacatccagtatcgtataacacaaggggggtttcttgaattagaatgtcacgaagggaatagaccacgagataaactcctctcgatgcgctctatggaccgttaaacactttctcaatctccaaccagtcgatgtagtcaaccccggtcagtggtaatgtcggattatggaaactagaataaatcccttctgcttccccggaaagatctagattccagtctccctgcatatcaaacattgcgtctgggacatccatgttagaccatggctcgagtaaactgatttcatcttgatggtcaccccggccacttgaggctacagtcatgtatggtggaggatctgaggaagccaacaaggcatcttgtcttgggcctggacttattgtatatgtctgggtcgtgtctcgggtagctgcatcgctgtgcgaggtatttgcatcgaagacatgattcggccaaacgtgcgaataagattgggcaatatcctgcaggcgtcgctcggcagctagattgccagactttgatagaaatcgaagtacattacatgcttgatcaagcgctggcggtggttgactctgtgatttgtccaaaaatcccaccatgaccagaacaaatgcagcggagaatgttgcgtccagatcaaaaaagccataccgggcttgtgtttatgtcagctcttgatttgaataactaaacataaactgggggatgtagggtctgttaggttagagcactggaaggactcacggatggtttgctggagacgaagtgattcaagtattgcgagacttctggtggctgcctcgtcacacgtatcacagagacgcaacagcatactcggcgccggttcagtagatcgcgactgctgttggctctgagcttcaaaccgagctctttgaagtaatattggccgtgtgcataggatgatggcctaataacgaatcaggaacaataccaataatattttctgttggtgatcgtcccacctgaaacagcattaggtacaatgatgcacctgtgcgagttaccgattgtaaaggtcgattgaagtccaacaccaaagatttagggaatgatcggcctgtgtcatgcagttcttggagaattccctggatcttttggaccaattccagttgggtgattgacttatttccatatagagctgttgtaggtgtattagcatgatgccaatagcacaacggtgtatatcctacttgacattatatcatcagtgacacgcgcaatacggacattgatggcaagggcaactggcgactggaaccccatcgcgttccgcgggagttcagttcgtagctgtcgttcatcggctcctgcagccagcccgagacctgaagagaggcgcctagaagtgtaagttgagtgccaagcccctaaagttgccaaagggcctacctgtcgagcatgtacactgtccaccagagtcttaatctgtgggcactttgagaagggaggcagcgttggtcgacttcccgcagattgcacccaagagcaatagcaagccgcagtgcgagtccaatctaccacacgtcaatgatactgtgcaagagcattgtggatcttacacaacgtacatagagatatgcatcatgtttatggtcacaccactgaagatatgtagcaatcagtgtcagtatctcgacggcgacaacaccttccccacccatatgatgcaacggaggaagacgcttcaacgcttcagcgaacaagtccgttcccggtgtctgtgatgtgggatgttttacatccatgagctttgccatggccatgaccaaaagatattctgtaaaccaaggagagttgatctgctgttgtcttgtctccgggctctgaaatagcaacataagatcgtccgagaaagatcgtgggtcaaagaaatgctggctcacgccaagatagaaaaggaattgatcaagcaagtgctgtgattcctccaaagacgggaaagttactccagcaacattgtcaacgagctctttgaccgacgtccactgaggtaaccgatcagcccgatattgaaaatttgaagtagatccatggaagctgcggtcactagaatgcgacctgtcaagaagcgatctaacctgagactcgaatgcaggcccggaggtcaggtccgttgcttcgtgtagagtcagttcatatttgcaagcagaccaggacgaagaaagcgatgtcaagttacccggacttatagaaggatcgttgtcggtatataatagctcagtttgcctctgactggaagaacttcgttgcgcagattgacggcctggggcctcatctggtactactgaagaatgaaatgaagagaccggagcccctacagtttgagagctcagctgctcttcataggttcgtaatttttccaagagatgtttcacttggctatttgccaatcagcaagactagccagatcatacgacgcatatgaacgtacgcttcagaaaaccgtctgcggccggaatgaccgaaagtgcattcccagttgtgtttgatacaagcacgacaaggtttatcaccggaacattttactttgcgttttcggcatgtttcgcatctgtccggttgttatcatacatgatcccccgcagccggagatgcagacgcattacacacttacgcgttggtagatcgtgggctggagcccgccatgatttgcaaagaagaccgcgtatagctgattttgatattgatttgatagccacatttcagtcacaagtgcgaggacgtgaacgtatggatcgggggttcaaccgaggctgcggggacatcggcctagttctccgagggcacccgccatcgaagataatcaaacatttccacctgggcatggttggataatgcaatcaggatgaggatgaattgatatctgcgtccgaagtccagtcttcccccgcgaaaaataagaggactgcctccgccgctatcttggagtcgtcatcatcatctttgccaggcacaacagagcgcctgatattttctaaatgcgaggcaagcaagtccgcaggccagtgaaattgatttgcaaattgatgacagagctcagcagtggcgaatgcatcgaattcaaaatgaccttgtaatgtgagaacgtggccgggcttgtagaggccgtggattggacagttacggctgcttccgatgttgagccatggttcaggcagcatcatcccgggaactagtgtgtcttctggtgaagatatcacggcatcaccgtggatgatctgaatgcggaatggctgttctggagtaaaccgagctagaggcgggacgttggagacgaaagctggattcaagatgatagggtgcatgccaatttcgtggccactagatgaacgttcgaccgatatcttaaatgaggatccttggggcttgtagcttttgtcacttgcgaggagagcttgagctataagttgatgtccaaagcaagatccgaaaatcctcaccataggatagtcgacatacaccttctcaatgaaagattgcaagcctagaatccagtgcaacttgtcatataatgctgctgcagcttcagtgaccaggatcgcatcgacaggatctggaaagccactgggtgcattttccgtcgacgaccaagggctgactcgtaaggactcgagatttggaaatgaccaaccaacaacgtcgaacgcagtgattctcacacctaaagatcttcggtgctggtggtattcgcttgcattgatacgatttgcggcggcagtgagaagaagtttgaattgtgagctgtacagtcctcgcttagcgtagacagggtagcaaggaatgtcagtgtcaaggacagcaatatgtataggacggacagacatgttgatcaaagcaaccagtgaaagacaacgaagaggagagagaatgttcagattaggcaaacgaacaactttccatttgtcattttgtcggataagatccgaagatgtcgggacagatggccgatctatcgaatagcatgttgttttaactaaagctctttatgatagcctttgaaattctttgattggattgaaacgctttagatgtagtagtatataatcgacgatgacagtaggttactctatacaattgagattcacacggccttaagaataccgtgagggttcgtttctttctttctttctcctcccttgttttcagtcacgcaaaacatttaaatccgcttcatactttcaatcaacgcatcgcgtgtgtcaggagtacgagtggtctctcgtatatccgcgccgagtatcatgcctgcctcttgattgcgagattcattacctgaagtctcaaatgtcttgttcgtaacgaactcatcagtgagatcatagcctgagatactaggctttgaagggtagatttgtgcaagtattcccctgcagatggccataatctttttgcctctaccttctcagcggtatcaccgagttttaggcgctttgcattcaggtaagaaatcagaaaacggaaatagacgtagctccaacacggccgtttatctgagaggattttcaacgggcggagatcaacgtgctataacactatgaccctatacccttcaattgttggtctggtcatttttgttacgagccaattcgattcagaagaaaagagtgcaattcaaaccaagttctaagtacgaagaagaaaggaaaaagagaaactatcagtgtgcgcgttcttcccttcttataccctcgcgtttgtctcgcttagttcccgtttgtcaatttgggaaggtacgaggacgtggttcctgcctcgtttggcaagtacgatctcaagtacgacccttcctggatcgtcacaattttgacttgagagagagttttcgacacaaagaggctggatcagctttgagtcaacagacgtgaggtgaaaaagtctgaaatcgtaagctgcaagatcaaaggataactataaccttagaaggtacctatataggtatgggtccgaagcctaatttggcttaatggcattgtggagaggaactttcttcccagtgagcaggagcatatatacaaaacatgtaatcccaatgttatgaaccgtcagtatgctcccagcgttagatccttaactgccttggattgtgtaaaggtctaagtcgcaatatgtgtgaaactattccccccagcatggcatataatgttggcactataataccgccttccaaatctgtccacaaaccacctcttccgccaacttaacaccgccttaaccccgatatcttcgctttctcacgcctattcacggctactggcgtctacttttgcttcgggatatccatagtccgtgatcgtcaccaacctttgcttgctgctgcctcaagccactagggaagtataaatacctggtcctcccccccaacttgctgtcttttttctttcttctccatcctagtgcaagggcttgacgcgtatcagtgaggagacatccgagatcgtgtttttgctagttgaaaactaccaacttgactgcttcaagtgagccttcgggctcgcttgggaatttttgaaacatgcttacctcaactccttgactcttgagtcctcgagttaaatcctttgaatgtgatgccatgatgggtatttgactctgtcctgagtgtgcgatcacatgccatcaggttgagatctttgttttgtttatcttcgcgtaggggattgtgtttgtatagatcgttaccataactaccggtttacttcacatattacttccttccttccctctatagtatgatgaattgaatactcttctttgaacacctgcctcagaacatgatgatctaataatctattcccatgtagtagttactaggctgcacactctataccataaccctgctatcatttgtctttcttatacaaacaaagcatgaacccacttgctttgatatctgtttacccacgagtttggtcttccctttcatcaacctcgggcaaatgaagcctagaatatccctctatttattatttgtacctgatttacctccatcacttccccgataatcagcaagaaaaactacatctacacacaagcatagtcatccatctctcaaccccaaaccatgactccaagcaatccacctcagcccaaaaagtccgctgtcaagcgaggacggcctgcaacaggctttgataaaaaccacgagtttctactgcactgccttactcaatcaggtgtccgagtcagtcatggatattcagtcccctatctctaatctctggctagcttttgctcagtttgttgcaggtcgactacgctgccgttgcaaaatgtgtgggcatctcggagagacaggcccaacgccatttttattggttgaagacgaaaatcgctagctatgggaatgctactctcacacaggctgagaagcagggtcaggggcagaatgatggccaggatggccaggatgggaacgacagctagcggctgtttctcacgtcttcgtcttgtccccctcccttagtattttcgatcattctcgccttactctcaaaggaaacagcttcgtgtgcaatcgaggatcgactagagtctgtcattgactgccacgacttagaatccacacaataaatgcacgttgttcatctttcaatttccgcattacagccctagcgtacggaaacacaagaggtcataatcctgtatgtactaagacactgttgacgacatatttaaaccgttggctagatacatgacaggaagacctccagcaaagggataacgaaacgaataatactgcctgaaatgccacactacacacccaacattaaacacagccaaggcgctcatcctattaaccgaatgagggtcctcgtgattaactatcaattaccgataaaaggaagcgggattcgagcctggtccaccctgtggctggtatgcctgatactcgcccgtgcttgcggcgggaggtggtgggctgtaggaggtatactgtggctgcgatgcaccaggtaccggcggaggctggtgcgatggaggaggttggtgggcaccgggagagctgggatacggggcttgttgctgttgttgctggaactggtgtgcgatttggggcatgctggcggcaggcgggccctgaggtgcctcatcggtggagtaggccgaaggtgagtagtcttgctgttggtgctgctggtgctggaattgctggtggccagcaggtggggcttgaccagcttgggggtacgaaatgcgctcaacaggtgaatcatagacagaggtccccaattcttgggggtgatcgtatgtagattgcggacggtggctgacaggttgataggggtcgccgtggggtggctgctgcgatgcgccggcctgagactggttgcgaggatctggggagtgagaggctgggcggtacggcatctgctcgctagtagggtatggtgcatatgcatttgccggggctggtgtggtgtctggccaagtcaagttagaactaggtgcccgtccgtatttctagattatactgaccttgaggccgaggggtgaaatatcgaggatctgcctgaggagtaggatacccagcaggcgcggcactaggataaccgtactgtggctgggcaggtcgtccatattgaggctgcgccggatgggctagcgatgcctcaaggagggactcatagtcgcgacgagccttgatgaacttttcattgagctgggtgaattcatctaaacacacgtaagccggaaatccacggtgtaacaaacgactggctgattacctttcttttgcgaatattttccaatcaattcgatgagttttggccgaatggcaagcgtagcttgatagagtgtagtaatctcttcgttctcttggacattgagatctgtattgcgggtgcttagtagagtcaggagcttctcaacactcttgatctggccaaagacgtccgcctccatttgagcctcccgctgcaactcatcgacagtggggtctgggagtttctccacatagttgagagggaaaattccggtctggcctctcagagaacccttccaccaatccttgtaaacagactccaggactgcaatggtatcgcccttgcggaattgaagctctcctggctcggacggttggaagtcgaacagcgctctcacacgcgacacggtcgctaccgatgtgcctgagagagcaggttgagtctcggcgggctccccttgggttgtggcagctgatgccgatgcaacagcagcagaaggagcctcagctcgaggtgctgccgcagaagcagccgccggtgttgctttatccttaatcgagagggccaaagccatctgcaattcctcctcctccatctgacgatcgacgtcggtgatctcacgctttccaggtttcgacggtggctgcagattcgggtctgtaatataatcagtcgcgtccggagtataggacgtagaaagatacttacttgtggtttttaatttcatgtatgcctgttccatgatgccaaaatccgggttggatgagaacatctcagtccattcttccatgcgctctagaatcttagacttgacttgttgatgcgtattctagacaaataagtggttaacacttgccatttgggaaaaaaacaaaggtttcatatatgcttacacgatcgttcgccaagcggagtagcgcatcagtgaagctcctcgaagccaactcgcgatgaatcttcagcccgcagttttgcgacaacgcatttgcaagctaggaaccagtcagctatagccataaacgagagagttttcgcgctccaaggagcacagtatccggccacgaacctccaatgtatagagctggacgttggcattccggtgagccagtcttttgatcatcgcagccacggcctctttcgcactatatcgcaacaatcagcaacgggtcgctagacgagactgagattcagagctagccacgtaccctgattcctctgcaccaactttgtcacagacatcctaaaccacaaaccccgaatcagttatgtcacaaggccggaaatgctatatggcatcatgcaacccaccagaatgaattcccagttctcggaggtcaaattctcgtccgtcgccttggctatacagagacaaatatcgtcagtaaaacacatcacacaggcagatccagcgtgtccccaggagcttttctccaagctagccagctccaggggtgcatggtgtatctgacgaagcagagaactggtgcaacttaccgacggcctcatcgaagtggttctgctgcgcgcgaaacatcgcgaatgtatctcctctaatcgtcgcaggcagtcaccgggtggtatgtgggttgtcggagaagtcgggcagcactcttcagcttctgacaagcggcttgccttgttttcacgtcgcggaagttcagcgacaggttccaattagacttgagtagctaagatcacgctcgcttgcgaaccgcggttgtgtagcccgtagcgatggtccagcttcgaatgcggggagtcgacgacaggaaaggatgcggctgggctgccggttgatgcaggtgtaaatatcacagagacagggttttggcagggatgggtatagcaagcgactggtattgcagcgctgggcatctgttaatcgggtccttggggatgatcagggacagtgttgggggtacctagttattgtgtacgggcggaactcgtcacctgagtcagcatatgacgatggagacctgcggaactgctaacttctaagttattattagcttggactgcctggattcttctatattgtgtctgcctggtcaagcttctaatttctccttcttttctgcttcttttctactccttttctgatcttttttctcacgctagttagaacttcgacatatcaatgtaggctgctacgtttcttcccacattggtttatcggctgtggctgaacatatctccactacggagtacctacggagtactttaggcacagactccctagaaatgacggagttcgaagctcattagctacttactttcaccataagctaacgacaacagaatgcgcaaatagaactacaagaaattacatagaggccaagatcaaatacagagacagtgagcggtaaagcagatatcacaggcaacgtgctcatggatggagtcattttcatcgacaatcgatgtgaagaataataaaggagtctgggtacataaaatggattccagcgacgtactgtagtgtaggtcgggatctagaagaaaaatcgggagtgacggggtatctgagcaagacgtcaagagatatcaagtacgacaaaattaaaccgaaacataggaaaaaaacaaatggggtcgttcatcagcatcctcttcaagcgcctcctttttgggctttctcttgagcgcggctgatacgagcagccttaaccaagggggcgagatgcgagagtggtgcgcagagagacatgaatgggtgctaaaaagcgaagtgtcagttatctctgcgagagcaatggaaaagaggaacgagtaagtaccttcagtaggtcatgcgccgacgcccgcttctccgggtcaaccttcagggcaaagtgaaggaattcgcggaataccggggatagattgtgctcatctttgatggtgggcgttccgttcgtagcaatcagatagagtgctcgcagcggggattctgtcaggtacggcggctcgccctcgatcatctcgatggccatgatgcctaaactccagatgtcgaccttacggccatactctttgcgagtgacaacttcgggggccatccagtacggggtaccgaccatggtattccgcttattctgcgagtcgttgatttgagcacagaaaccgaaatcggctggagattgttagcatgatttcgacacaacgacagggcgaaacttactcagcttgatgttaccatccattgccaatagaatgttgtcagatttgatatctcgatgaatgacacctttagaatgcaaatgctggaggccgctcagagtctagtcgaaatagtcagcatcccagtttcatcttgatacaagataaccattctgtactcacctctcggcaaacagctgcgatctgtccctcgctcataatgttgaaggtaaccacgtctgtcaaactgccaccttccatgtattccatcacaacccaaagatccagcccatgcaagaagctctctaaaaagttcacgatgttcttatgcttgctatctttcatgaccaagatttcgttaataatcaggtccttcttgggttgcaggtctagattcatctgcttgatagcaacgcagttgttgttaggatactcatacgctgtgtacacaccacctgaagcaccttggccgattttgttgaagttgtggtagatctgggtgggatcggcagggttgcagattagcatcaagcgtgcccgaatatccatggcgctgctctgtcgttgctggcgctgtctaggtctagcagcaggtggagcgcgcgcggtaggggacaccccagacgaaagatctggcgccggagcagtggttgatgtggaggcagctggaggctgctgtgcttgctggcgttgggtgcgattccgttccaaagtctgctgggccgcggccatgacttgctcctgttgccgctggtattgtgtaggggatgcgatgacattggggacgttggggacgctggccgtaggggtgccatttcgggaactggagcggctgcgatggggcgatgatggcaatggctcggattccgggatagtcggagtgccaaatgtaggagcgtggttctccggagcagttcgctgcggggatgtgtacgaatttgagatcgggggttgaggaggagggcgggagggggtcatcccggtaggcggtttcgggggagcacgatgcggcaccataccgctcagtggaggagatatgacaggcatgcctgccggaggtccgcgaggaattggcggaggcgatcgcggattctcgaaactgctttcgtgattttgcgggaatcgtggacttcctggtggcgatgtttgttctcgtgggctggtggcttgcgcagcttgagcagcttgcgcattgtcgaacttgtgccagacttcatcatcgctgtcgccacgggtgttcttctcgtagaatcgcatgatatccatcatagtctgcgggtgctcctcctgctccttcttcgagataccgttctcctgtagtagtcgctgccattctttgggcagaccggtgaattggccggtctgattgtcgtagccgacgtgggtaacgtggaccggattctctggagccgaaattttcatattgcgaccggggcttcccagcatactgtccacgaatctggagaagctggcctttttgctctgtctcgttcggggagccggaggattgccatcgtcggaatgctgcttgccggggttcgggggcctttcggtctcgcgatgagcgaaggaatccattcgttgcgtcagagtggtgaagctcgctgactggcgcagtgagtggcgtccgcggttatcggggctggtgtggttcgagcgcagtgcgggcttttgctgggagtgaggatcggtctcgacgctattctcatccaatgcactaagcatgccccgcgtttcgtgagggccgttcaattcatccgaactctgctcgttgtaggaaaaccggtgggaacttcgggtgcgagaccgggaggtcagattggagaagaagccacctgattcgtcgttggaaggcgatgggccgccactgttctgatccagagacgacgaggaggaacctgggaattgagcgttggattgcgatcgattatgctcgcgactaccgctgggagaggaacgtggataaacgggggcggagggggtacgtttcaacgatgtggcactctgatggctccgaagaatgcgcgaactgaagctagggggatccttgtggagtttgctagaagttcgacggaatttcaatgggaaattgtcctgattcatggtgggcggatttctgtctctacacgagacagattgaaattgggccgaggaggggtcagatgcagttgttttatttttctggaccaaccaagttcacggacctgaggggaatttatggtccgcggagaataaccgggtccccgaaggttcttgacgatggatggaatggaagattggaagggaagtctgaagagaggaggtttagcacgtggagtgggaaaaggagtcgggggtggctgggcggtttgacaggttgaagggtatagggagatctaacaacatctaaagtcgactctatcagaccgagtcagagacacttacagtcctcatttaggatgttataagaatagaacgaccatagagtctcagatttctacggagtaccccgtttattattccttacacttaacggcttctatacagatccactatctttaaataactaaatattaattgtacctttctggacctccccaatacaccacggagtactagctctccagcaaacagaccagaagtacctatcactccccttttgcccctggcaggtagccgaatacgtcctaaaagggttcaaccgccccgggttggacgggtcaagtgtgacagatgcaagccaatatcactcggcacattggaatccctgggcattgggcatccttagccctagaagaacaaaagcacagtcgcacagatccctcctgagcaattaattacaacagacggccattgtaaccgatttgctgagccaccggcttcgggccatttttcttccatatgcgccaccgttggttaccttcgatatctcgtttgcacctcacacgttgggcaaacactaggttgattagagtccgtttacacgggttctactatcctcctccatttccccattccatttgactcggatcggtatataccactttccatgatgtggctttagcgttccccatattagtttcagatattaccggtggtgagatcgaatgagacgtggtccgggctctaagggcctttttcaactggccaacttccatgcgaagattgaccattatctaaacatcctcttcacctcactgtcgttggtccagtcaagcggggtctgagatttggcctaaaaccggaccgtacggtattgacagaggctgatcgcatgactttcatggagctttctgcgcattctcatctcactttaataggttgactttgatatctgccctcgggaattacaaaaaaaaattagagatccacagtaacatatatggccacgcaagctagccccataggagcatatatttatagcgagcaatatcaggaaagattgttcaccattatcattctttgattcatacaaatagtatcgggaattcaggtctacaatatatcagcaaaaacatggtctatttggttaacaaaggttgtcgatccaataatctctctaaacacttccccactatcttcaccactttcaatcagctctgtatactccaatatctgcgaccgtcattcaccccctaaacggatggaaatagtgatatgaaagagttgtgtgaatgggcccgacgtactaactcctcattgcggaaatcaggtcatagtgcaaagggaaggaggcggaaacatgcctgttccgttttgaaatggtcccgacatacagattcactacagaggcgcgcaggaacaagtccactgtcgttcatggttattctcatgtgcgtagaagaacagccttcgaatttcggggttaagattcaccgtccggtttagagctgtaaatagtagaaccgctgggatgtaccctcttcatggggcacactagcaaacatctagtatctggcaaacgcctcctgatcatataagacatctagatcaggcgaataaagcagtcttgcagtacagcagccgtgttaaggtctgcatcggtaaatagcggtgcaggtagaaaatggtaaatcaggagtgtagctgggtagtactcaatagcatacgcttgatcggagggttttctaaatcactgatagagtagggaacaattggcgagggtaagaataccttgcctgccctagtatgtgattcaactctagaaatgtggtttgtatgtttgacgttagctgaagtgaagtctagcttttcaaggatagtagatatatcacagatatttacttgtactcaatctccttacgtggtatactatgtaaacatggttatcatagtacagtctctgtaaatctcctcggatatgactcgaaaatcagaaggctgtaaagatttctcacgtagcgaccactcgagccttcctcttgtttacttcaactattcttctcacacacttctcccctccacctttcttcacttcagtttactcttctatcaagctacagcctctgtatcacacacagtctagtttacacttcatctgtttgggctctagactcttaacgatttcagcgacacccagcgtggcgacttgtctttttgggcagtctcttgtctggcttgtcacgcatctgctgcaatacttgagttcacatttttttttcacttgcgtaagtctatttttttcactggtcttttcatctgaatcctaacttctcttcattacgtttattgaccatcgcattatccaggtactttcctttcctataaaacacagcattatggagggaattacatccgaggctgccacattcagctatttgttcttgtccggtgatgaaacatgtaaggcaacggacctcgctgcatttcttcctcggtggcttagcgaggtcaatgagaataggctgattcccccgggtatcccagagctactaactcatcttttactcccatttggaacacgtgatatcctggaacacatcgcgaagctccgaatccctgactctttgaccgatgtacagaagtggatggtaaaacttcaagtccttgtggataacaaagcacacgaaaggctgctgcagaagttggaatctatcccggatcaaatgatatcattcgaagatatctgtggacaatctaacagtaaggacattgtttgatccgaacctctggaaatgatattgacatacgaaaactcaagcagctaggacgaatgataacctcgccgttgaccctaggcgcaacctccggtttgaccatgacatacgagatgtgatgattcggggcgacaaagacgaaatgagacagtatcaagacgtcttttacgggactggctccgttgcctggatggttcgatctccttactggaatatcgccttggccactgacgatgaaggtattcgacttctcccggataatgtcttggacagagtccttcccaaatggagacaaattctcaccggggagacgatcccgaccccgaaatatggcgttatcgattcttttcgcgcgtggttggctagtgaggagaaaaaggccagtgatctcggcaaaccttggcccaaaacccccgtcattcccgtctcttcagccccgaagcccaagtttgtaagtcccaagactccggatcgatctcgccttcgcgccatgaattcgagtcgtttctctccatttgaatctagccccaatgcccccaacaatgagcaaactgaattgctccgagacatactcacggaacttaaagacttgaaaaatatgattagccaaaatatcggaaggaagcaagagtgcgagattgcaggaaaccaaccgtatggatcttggcaacagagcttccatcccattccttccatgcctcaaggaatgcaaccaaattatctcgtgccgcaacaaagtccattcgtcggtgctcaatatctacctccccttcctcacccggagtgggaacgctggaactcccagtaccaaggcccggctaccatgcccgacccgggacctggttcagcttctcatccctaagcctgcccataaccaaggaaggggagacattcatgtacgatttgatgtggggctctttgaccccaatcactacagagagagttgaaagtgaggatgagacggtacgtagatgagcagctgttgctatgttttatgttggacattgaggactacacctcctcgctgtatcatgtcagattcacaagtatgcgtgtctgttaggttcaatcaatcgaactcaacttcagtctattgctggtcgtatgggactgatcccccccgcttttagtgaagagagttgaccatctgcacagtgacgaatccgcatgacaaccaactctttagcttctttcaatctcaaatatcagtggagctaggctgatcttacgcacagatccttctcagatgattggcttaatatcgtccgcagtcggtccacatgggtgcagatcatcccggagtaaacaaagatcaaatcacgcaagttagtgggatatgatgtatcccaaattttatttcgctgaagatatcaatgaacagaaggtgaaatggaaattgcaaaatcaacttcactaaaattcactagtgtcaagggtaggtgctctctcccttgctgatgagaatgtggaaccacgcacttgcgaataacacgtcccgttcctgccgagagacctttagcttctagaccttgagggcggaagatcatcggtgtaactcatgtgggggatatgcagaagattcaatggagtctaaacgcaacgtgtattgactgtgccttccacaatgcgagacatcacatagattcagacaaaatccagagttagttacagtaagcagatgctgtaagcatcaaggtagctcttttgcagagaccactttttattttgatgatctaccgatcagtaattagcgcatccctttgggcgccgactccagttagactggactcaataccgacatgcgccttacatcgcccagataagatgtacaggggttaacagtcggtgattggattagctgtcaatatgcgaaatgggcatacttcgggacctaacctgggggagctgcgaatggtgtagaccggatcaacataaattggacgtgattcctccttcccagggtgatttttattcacagcccgattcccccttctgtctatacatcatgtttggtctcattccgctgctatttactgcactcgccagcgcataccctaacaggggcccttgcacaggcgactgttgggctcatgacccagccatgatccagcgtgtgtcggatgggaaatactaccgcttttcgacgggcaccggtgtcagcattcatagctcgccgtccgtgaagggtccatggacggaccttggctcggcgttgccagatgggtctaagattaccctcgatggtgtggacagcaagaatatctgggtaagaatgacctgaaaacgcaactgggaacaatatcaaggccaatggctaacatgattcaccttataggcccctgatgtccactaccagaacgaccagtactacatgtactatgtcctgtcacagatcggcacccagaactcacagatcggtgtcgcaacatccaagaccatggatccagggagctggacagaccatggctccgttggtctccctgcaaacgacaactacaaccgtatcgatcccgcctggatcagcatcggcggcaagaactatatgaactttggttccttctggggcgatatcttccaggtccagatggacactcctctgcaagttggcggcgcaactccctatcaaatctcgtggaacgctactctcaaccaccgcgaggagggttcatacgagttcaagcacggcgactactactacctgctctactctgctggtattgcgggcaagtacacaaagacattcccagctgagggtgccgagtaccacattcgtgtttgccgatccaagaccggtcttggtgactttgtatgtttcccgtctttgttcattcgtcaagacacgttctaacatttgagttacaggttgatgcagatggaaagtcctgcaaggagactggaggcaccatgctcctcgcaagccacggccaggtatttggacccggcggccctggtgttgtcaatgacaaggacctcggtgtggtcatgtactaccactactacccccttgccaccaagcagagcaccgatgtctccgacaacgcgaactataggtacgcctggaacgttctcggctggaaggacggatggcctttcgtcaaggccacttaatgcacatacttttcgtggggagcccgcggggctgatacatatctttttacattcttctcttgtcgatgattgggctcatatacttttggggggtattgacttgtttattcgatacccataccttcttgatatctgtcatgatgcacttcctctgtgtctggcaactcttaattatataatattggtcctattcttattcatatgggtcaatttcggcattgcccgacccacatgaagcattctacaaggacataatttacctatgcgctgagacaagtctataaattctcgctacatttggatctactctaaactactagcctaagcgactaacttggaaaacctgtttgaagacctgcatgcttagccccggtgcttccaccccattttctacaagaaagtgaacacaaacttgttcgattttggttcaagctttccttccttgagcggttgaatcaacatgtctattgcagcccttcctgtagacgcaatggtcgcaatctgtgatcatctagaactgtcatattattttgcactaagacttacctgccgagcaacatacaataacacaatagagatatctgcaaggcggtgctacaccagtatctctttgcttctcacgagtgacagtctctgtcggctagaagagatcgctgctgatgatattcttcgaacattcgttcagacaatttggattgtgccagccctattcgaaggcaaggagaaaatgacagattcccgcttcgcgcattccaagtttgggaatggggcagggaagggttggaaggggaatgcggctgagctccaggctcgctatatcgcatttcaggctatagaagaggaccaccgcgccatatcaaagtcctctgccctcagagataccctagatagatgcctgccacggtttgaaaatgcggtcgtctttggtctgcagtcttatccgatggaacgtctcctcaatctagaaaaaggaagctatattcgttgcctcggcctacccgaattgaggaatcaactgagttgcactgggagaccgtcaacgtggttcgatggatgttacctaccagtaatgggcaatgcgcatgcctttgctttttccgctcttgtggaaacaattatcaactccaaccgagaagttctcgcactacacacatgtcgcggatattactgtggaatgacaatgcgaaaccttcaactgacggagtcacaatacaaactcttgctacccctcctacgggaattagaatgccttcatatgtgtctccgtctcccgaggaaacaagaggatctcgataaaagtggcttctgtttccttcttgatatccttgttgctgtagcaccaacgcttaagacgctggtgttttctcaatggcacccaaaatatgaactgaacccacgatactttgaagaattatcccggggtctccacttctcgcagctccaggatcttagccttcagtcgattgaagtcacagtcaatactctcaaggcgtttctacagagcgcggctgcgactttacggcgaatgactctgaagtcagtagggttaagagatccaatcacctcagcgccagatctaggacctatggaccgagaaagtcgaatagtaaacccgagacagaaatctccgcttgttataatgccgagacggcgactgtttcatttgatacctggatccaacagcgtcgactagagatgtcgacatggtgcccattcgatttaccggggacgaattatggtaagtcatccagctatgactagaagcttctgttaacctttgacaagaaccgagagttgggtcagatggattggctgagaaaccagttggcttcgcatgtttccctagacgcgacaaatctcgaaaataagtctaaaattattatatatgacatgtagttcaatgccgttgaatatcacgatccccatataaatgtagccacagtgacgtgcatcatcaattggccacttgccgccacgtgcgaaatccaatcctgggatataaaatctaaatctaaagttacgaagtgattgattcacctgggcatttgagattgcttatacaatgcttgattggatttcggatggcgttataacacgtatccgaatgagagcgaagaacagctaagctattattgttgtatctcaaattcacctgcgcaaatccaagatcaataactattcattatcaattcctaaagaaaagagcccaaggcgtgaaaaggtgcaaaagtgtaggcgcgggctcggagaaaacatccccggagattcgagctggccttttcctgtactttctggattgtccggggttctcgacctttctctcacctctcacctccacctccacctctcacctcctcttcttctctcacctctcttcctcttttctttcaggtggctcctctcttgagcccctgtatctttcttttttgattctccgcgcttcgtcggtccaaattgctattgcattttcctgaattgcatccgcatctcctgaaaagaaaccctatatatcctactcaattacgaaagaaaaggatatacttttgcctgtaagttattcccaagtccttgtcatgccattgattgcacccggggtttacggtgatctgtcctgatctgtcttgatccatcgttattgcatactgacccggcccgtcttgattgcagcatttcgtgcatagcccatttatcaaccttgtctccaaccccgatttactccgtcaacccccattactcctaatggctcttgaaacacctaccactgccaacggcggatccctcgctgccatgttggaacagcagcacgcccgcgacgagttgcacaagcccactgtggaggaaattgtggacgaggaggacctcaaacaccaccctccgacctcactggagcccctcctcgtcgatgccgacacacctgagcctacccccctcgccaaaaccgcttccccggtgcctgcacccaagcccgctaccaaaaaggccccgacattcgatgttcaatccgaagaattgttcccggctttgggcagcggtccgaagcctgctgcccccgccgccgctacatggggtgcgaagaaaccttctgcggcctctgctgtcgcaaatggcttgcccgcgaagtcaatgggtacgtggattattttggaccttccggattggactttttttgacaaatgaacagagatcccccgtgtcatggcccttcccggaaagcacatggagcaactccgcctagcaccctcccagatgcaaccccgtggccagatgaagaagcctcttcgtgatatcctccgggatatctcccgcaggtcaaaggccaatgttgatatgcgtggtggccctggtggctccatcattttcgaaggaaagggctccgtagatgcggtgcgccaggctctccgcgaggtggcccagcaggttggatctaaggtatgtgtcttagacgtgccggaaacgagtgtctaggctgaccaattcgtcctaacagcaatccgtccgtgttcccattcccacatctgcacgcgctcacatcattggccgtcaaggtaccgttgtgcaggatatccagactcgcaccggtgcccgtgttcaggtcccccgtgccgaccccaacgctgccggtgccgacgacgatgatgatgataccattgatattttgattgagggagatgccgtggccgcggagatggcccgccgcgagatcgaggcgattgtcaaggagcgcggctccaacatgagcttccgattgaagactgtccctcctgaattcttccccttcattgcaggtgcacatgacgccaacgtgcgggccattgaagagcgcacaaaagcgcagatcaacgttccgcgctatgatacctggtcaagtcagccccctcctcaggaagccaaccctggccaggttcagtttgtgcctgtgcctgataagcacattttgatttccggagaacgggctgccgcacaggaggctcgtgctgagattgagcgcttggctgctcaattgcatcagcagcttacactgcgccagctggctatcaatcgtggccagcaccagttcattctgggtaatgaggccgacgctctgcacgacttcgttgcacagactggatgtgccattgttctcccaccttcttccgatgagagtgagttcctcaccatcaccggtccccttgacaaaatcgaggctggtattgaacacgctatggatcttgcgacaagcatgcagatggctagcattgatctgtcccgccagcatcccaatgctcccgccggtcccaatgcccacgcgagcgctctctcgcagtacctccgtcgccgccaggtcgttaaggaactcgaatcgacctacgatgcgcacattgcacttcctcccagcgttggtggacccgtcacttgggaggtgtactcccgtgacggcaagaataccattcgtgcccgttctgatatcatgaacctagtccaggctctccccccctctaaactccgccacgtccctgttgacccatacttccaccagtacctgcgcgacaagagcgcaagtgcccttcagggtgactttggtgtccaccttatggtgccggatgacatcaactgccccgaggttgttcttgtttatgaaggcccctccgcaactgcctcgcgctttgaagtccccagacagcgcccctcacccgcagatgttgcagccttcgagaagggtctgcaggaggcccaggaattcctcctgagtgccctcggagaccagaatgacattgttgccaagacggtctccgttcctggcaaataccaggagaaggcgcgtaaattcatcacccgcgagcaggaggccaagggcgaggacagcatccctgtgcgtgccattgttggcgacgtcaagggttctcaatgcgagatttcgcttcgtggtccctcggcccgtgtggctgaacttgtcgccaagctggaggctttcgtcgtcgagcaggagaaggacgatctcgagcgtggttacaccactaccttcgacttcccccagaagtacgccaacttcctgattggcaagcgtggtgaaaacatcaacaagctccgcgaggagttcgatgttgatatcaaggtggagaacgggaaggtcgaggtcaagggacccaaggccaaggcggatgctacccgcatgcgcatcatcaacatgggcaagaagttggaagatgagactactcacattctcaaggtccccgcccaataccaccgtgagttgatcggccagcgtggaaaccaggtcaaccgtcttcaggatcgttactccgtccgcgtccagttccctcgcgcaactgttgccaatgacgatttgacggaaactggcagcgatgctggtgctcgtccccaacgtgctcagcaggctcccgatgaggtcctcgtcaagggccccagcaagggtgctgacttggctcgtgatgagattcttagcttgttgcagtatgtcattgagcacggtcattctgccaccatctctgtggcccagagtcaggtcgcatccttgatcggccagcgcggccgtgagatggacaagcttcgcgctgataccggtgcccagattgatgttcccaacgccaacgatgcgccggatgcgtcgggccgcgtggagattcgtgtcaagggtaccaagcagcaagttgctgaagccaagaagatcttgcagcagcgggccagcgagttcgatgcgactgtggttaagaccattgaggttgacaagaagtaccacaaggctttgattggtggaggcggtatgttttcatgcaaagtgatacgtctattttcaattactgacttaacataggtgccaacatccgcaagattgtcaccgaggctggtggccctactgacggcagcgccgccagaatggtccgtttcccccgtcccgagagcaccgaatcgaccatccgccttgagggcaacggcaagatcgtggataacatcatcgccgcgatcgaagagttcgtcaaggaacgccaggaccaggtcacggagatcatcgacatccccaccgcccagcaccgcatgctcatcggccgtggcggcgagacccgccgtggcattgagtccaagtttaatgtcacccttgatatccccaagcagggctctggccgtaccgatgtgaaactcaagggccccagcagcgccgtcgaaagcgccaaggagcacgtcaagtccatgctgaaggagcagcacgcggagaccatcgaggtccccagccacttgcaccacgtcctcgccgacaatggccacatcttccgtcgtctgcgcaacgactaccaggtcaccgtcgaccacgccggtcaacctgttcccgtacctgccccctccgccgccgaggacactcgcaccacagctgaaggcaccgacatgcccctgatcattgatgaccccaacacaaccaccgatgcacactcctggaccgttgtggacaacaacacatcagaagtcgcctccacccccttcccttgggttctcagcggcaccccggagaacgtggccaaggcccgcgccgtcatcgagaaggctcttgcctccgcatccgagcagtccattacaggctacctgatcctgccggaccccaagacctaccgctttgtcgttggtcagggcggcagccagatcaacgccatccgcaagaagacaggatgccgtatcaatgtgcccaaggaccaggctcgcggtgaagcgattgagatccggggtagctccagcggcctggaagaggccaaggagatgattctagaggccgtgcagaatggccttcaaggcgctgcgcggtgagtggttctggcttgttattgcgacagtggttttcgatctgacatataaaaccgactcttacaccacccctctctgctttgaattcgagcgagcgggaacaatatcattttagttgtattcttttggcttcttcaattcttgttttcatctttttttggtatctatttcatgaatattggttttttaaaaaggattctctctggtcttgctttcgcatttattgcttttggcctttctcatcctactgtgccttcttttcttgtagctacttccccagatctattcggattgttctacgagttgatagacctgtcgattctttgtgaaagtgacgagagcgttgactgcccaggtggctttccaatctaaatgatttcactctatcatgaatgaattggagatctgtatacctaatttagcttaggacatgctatggtatagatccgaatgcagattgcttactagaagaggaacccgatcgaacgctgtcgaacagcctcggacctaatatcctctcgtctccgtattagaaatcaccttcggaggaactaatgttggagatgcattagagatgaggggacgtcaggatcgtcgctccaaaaggagttaaggactccgggcggatctgccatgtcatcgtgatttgttggttgtacatatcccagcgaggtaactatatgttgacattcatttccataacaattcggttccgaaaactaaagattaatccaataaagtatgtcgatacatatgaatagataaaaaaggtaatataaaataaaaaaaagagttggggtactcataaggccccaactcgaaaaaaaaacgctctctttgctcttttagccatagcgactcggactcccatccgtatggaagacgggtatttaaatctcagattcttcattctgaccacacacaaccccactcgctagtcccacagtcaatcatctaattgcataacgaacgccccggccagtctactgctgagcctgttgagcctgctgggcctggaggtagttgtatgcgccgtatgcgatagcaccaccgacgaggaagacggcgtagaggccgacgccgaagccggaggcggaggaggaagacgaggagtctgtgctgctgctgggcttggccttgggcgaggggtcaccgggctattttttcgacggtgttagtattgcgtgtgacttttgtgtagatggggaaatatggggtgtggggggaaggatgtatgtaagaaggggtgcgtaccaggcgcttcacgttgccgacaaacatgccgtcgtcgaggagtgcgcgcgcctcatcactgtggccgacgtcgtcgaaggcttcggtgcagtcttggccggcgagatcgaggaggacttcctcaccgccactgttggattggttagcctggtggttctggggtttgatgtgggtcggtgaagcaatgcgagacgagtgaagacaataggttgaggtggccttttttttttttcgctcttctcttctactctcgctagcgcttgttctttggcttcgggtattgggattctagattcggcagtgatagatatggagacaacgtacgggtgttcattggcgaatgtggtgcaatcgtagaccttgtcgttgatgatcaggtagaggtccttcttggtgctgtgctcggcgacctcctgcaaggtgagttccttggcttcagacatgatgaattgaggtatctggaatgatattcccgttgtcagtcggggttctgtataaaaaccgggcaagtgaagaggggaatgtgttgagtggagttggcgataggagaaaaccccgagaaatgttggggcggagataggaaaccacttacggggtatggggaagtgataagtccaaaaagcagccagagtaccgagaaggagaagagaagaggagagaagaggagggagaggaattgacgaccaagacagaatcagcgagaaaaagaacaacagatgtcgctggtacgtgcggctgggcggtctcgttcgtgtggggcccaggcactggactttggggatgccgtgaattacagccggcttataagaggagtcaggcaaaaggggcgtttatcattggatggcttcgatgagtttctattactctctatctttgtcgccggtcccgatagttagttctgaattgagtctacactctatgtatattgcgctagataggatctggggtctgacgaatcaggggctgcttattagagtacatgaagaggagatctggccttgggctgtgtatagttagttagttagtatcaaattgtactgtagcatagcatagttaactggtacaagtacattaatcgtatgtacagtaacatgtatgaactcaccataacctcggggatcgattctcgggtagcaccgacgggagagcgttccgctgggcggaattaagtactagcacacttgctgttgtataaatatcataatactatgtgcataataatatacctctatccaatcgtcatcatgacatgctagaaatcaaaacgctcatttcgctggaactcgctcataaaacacaatgtacgcctgctcgttctgtaatcggtcccgcgtccgaagctcgcgcggattgaagttcgtggctcggtcgtcatcgaatttccgccagcattgccgctccgcatcacggaccagcgagatgtagtgtccgctgcccatcgaagacccgagatgccgtagcaccgcaaacgcatcgtaattgaacggtggaaccgtggccccggtggcgggcggcatgccgggctccggagggggaggatgagggtgagcaatcacaaaatcgtccatgcggagaccgtaaagcgggaaatcgatgggggtgtggatcttccgtgcgctttgggtcttggatgcagaaaagcgcttgaagtggacaacgagaatctggggcgctcgcgtgatgatgatctgcttggtcgccattcgcttgcatttacaaaatggacacttccagacctcgtcgccactcagcatctcctcctggcagtagctacggaggcactgatagatatcacctgcacctgtcggtgggatttccacactgatactgtagaatgcttcatatgtagtggatgtttgctggcaggtcgtgcagcgtagtcgactggcatgttgtccggcaaacagtgacgagataaaagactcctctcggtggcagtatcggtcccattcaattcgggaaaccttggtcattggcattcgctctcgttgcatctcctccgaaaatgtcaaaggtcgaagcggtgttcgctgccagttgatattgagatcctcgtggaggcaatcgaccacaaaatcgaagaattctttggcatcttgctgccgctcaatggcccattctcgattcaagcgtccacagaagttccggaacgaggtcggcatgatgacctcgacatcgttcttccacagtgaccggatcaggttcgcataaagtccaggcataacgccctgagatcccttccaatttttttgtacataataccgaaatcggttgtcgatgaagaacctactcagtggaatcgtggcacttaggcattgaagggtggaattcatgtaacacgtcacaccgaaattggtcaatccagtctgcggaagcttgaggcgatctaggcgggagcttggagtgtacagggctgttcgattcgccgagttctgtcgttgcaaatggggttggatctgccgcccatcggagacaccgctatagctgggacggggcacagcagggggtggtcgagagggagccactgacatgtgtgcagcataattcggagtagcactaaggggagggcgggaatccgcgtgtgtcatggactgttgaatatcgtgcggttcgggaaaacgacgtaggaaagcctcatatgtgttgacgaatggggttgaaggttctgatccagtctcctcgggttcttccgtcagcgattcttcctcggcataggtgctcgtgtcgatctcctcgactttagatttctccatccactcagataattccttcgaattcaaaggagtgaactcgcgcagtcgtctcttccgaatttcgagacttgagttggcactagccatggtaggcactctcccgaggggccgaccaggtctagatacgggctttctggcctgcagagaactcatggccgcagcagttgaggacgtcgcaagagattgttgtcctaaaagatcgatccaggcatccaatccaccaactaggagagccggaggccgtcccgccttcagaggcttatatgcattgaactcatagagagtatcgtagagagccctcaaatggggtgctgaagtccccaccggtgagccagcgagatagctgacggaatcggcgctttggtcatagtaaaccacaaggtcgtactcgttccgtttctcaaataatgcctgttcatgctccggtgaaacaacgagacgctcctctagttcttccgctgacacattctccttcagaaccacaggttctatgcaaataatagattttgcatatacatgaccattatcgtactggtctcgaggccgaacatcgattagcagaacattaaatttccgcagattatcaaggagactctgtgcagttatagttgtgctgtacggcaaatcaggtgagttgctccgagtttctcgcgccgagtccaacccattgggcgtcagggacctatacggattgtcgtcaaaccctccccgcgttggactgacccgtggtgagttgctgaattgcgagtatcttggattggttgagtgtgtgctctctgttgaccttctcggtgggttggatgtgggttttgatggcacggtgaagacagggctgtaagccgggtcgggagcacgtggtaacgatgtgttaagaggaagcttcggtggaatggttggtaaattagatgaagagcccatgacccgaggtcccaatggccgtcttggcggtggagagttgtagttcgatgaataaagtggagtttgcccagcagatcctacaattgggcttcccagccgagtagtacttgctcccaacccatgctggttggaaggaggagacgccttgagtttggcaaaacgttgcgcaagtgtgtcatctgcaggactggaaaacctctgcaaatttacctccgtctcgggcactctttgatactgagttggacttggcattctagcgaagtttgttccagactcttgattctcacggccccgtggcgtgacagaaatttgttttggggatctggatgtatatataccggttggctgcatgccactgaccaaattatcctcgatgatttcccgcttgatcgcatccatagtgccttgtttggaccgcaccgccttcactagatcggcgaactccttgtaccaatcagggcgttggctgacggtgcgatagtctggatgatggggaatgagattgatagtgatttcagaggcacgaaggtactgaacgtaggctttatcgttgtattcgtcgtctgagaggttcttggcctttgcgattgcatcggcagccgttggcaagaggatatcaagctatgatcccggttagaggaaataattcacacaattgtcagaagtgcgcatataccggtgtagtctcgttaacattcaacgcagcagcttggtcttgtaggtctttgatattggggaaccgaggtcgccgtggtgggacgagaggggccttgcccttgggatacgaatctggtcgggtgactcgtccgttgggatccatgtcgttccccatgtcgttccccaccgagtaaggacgccggttgtccttccacggtggtatttttgggggagatggcaaagtcgccgcatcggaggacatggtagatccaggcagcgacaagcggacttagcgcatggttatgtccaagattaggaaaacaaagagagtaaagccaaaagacaggcgtacccaatccgccgaataattgatcaagtccaaataacaaacacaaataacgaaagacagaccagagtaaagaggacagatccagggacaatgcgggatgcctctggggtaatcagatgacagtacttcaccgccctcagcctatgacgccaggggcttagtcactactgaggtgcctggaagctcctcctccaacttgccagtctgatcttcatatttgctagattaagtgtcttggctatctgcaacgctactgtgatctgagtcccctccaaattagacgtgcatcgggtgtttcgccttcgccatggcaggctggttctcttcaacctcgccgctcgatgagcaaatcgagcgggcgacagcttcctccttgtgagttttgattgccgcgttgttatcatacctatatgaaccggggctacctaccaggatgctctgaaatgaatgatcgcgtggctaactcactctcagggaagacattgccctcaacctggagatatcagatatgattcgatcaaagagcgttcagcccaaggatggaatgaggtctttgaaacgacgactcgagaataagaatcccaacatccagctggcgacactgaaggtgaaacatttattcccgtgagactaggcttggaacaagcgctgataagcccgcccctctagttaacggatacttgtgtcaaaaacggaggaacacatttcctggccgagatcgcgtctcgagaattcatggataaccttgtctcattgcttaaatccgaaggcgctcctcttaatgccgaggtgcagggcaagatattggaacttatccagaattgggctatggctgcacaaggccgtatggatttgatgtatttgggagagacatatcgcaaattggagagtgaaggataccggtttccaccaaagaccgaaatgagcggcagtatgctggaaagcagcgcagtgagtgtgcctcaaacccttccgttgcagaagctaatttgtgaatctgtctcagcctccagagtggatcgactctgaagtctgtatgcgatgtcggactgccttcagttttatgaatcgcaaacaccactgccgtaactgcggcaacgtgttcgacgctcagtgttcaagcaagaccattcctttaccgcatcttggaattctgcagcccgtcagagtagacgatggatgctatgccaaattgacctccaagtcatttgcgccaccgggaatttcggatcggtccgcgttcaaaaacaactccatcagcaaatctaacacgatggaacctcgtgctggtaaaccggacacagggttcgatgaggatttgcgtcgagcgttgcaaatgagtctcgatgaagccgagggcagaggtccttccgggtttgtaccgcagacaggcaacgctccagaaccggccaaggctgttccaaagccggagaatgtggacgaggaagatccggatctcaaggctgcgattgaagcatccctgcgtgatatggaacaacacaagcaaaaccatgcggccgcattgaagaacgtgcccacttcaaattccaccttgcgcgattcctcgagcacgcccactcaattgcctaaaaatccgtacgaactaacccctgttgaaaccgagaatattcatctcttctctacactggttgatcggctccagcatcagccgccgggcacaattcttagagagccgcagatccaggagctatacgagagtatcggtgcgcttcgaccaaagctggcacgaagctatggagagaccatgagtaaacatggtgagttcagctgtctttatttatagaactgcaagctaatcctcacagatacattattggacctccatgccaagctctctacggttgtacgctactacgatcggatgctagaagagcgtctgaccagagcctattcccaacacaatcttggtcatggagctgttcctgggggcgcgcagtatccaaatcttcagccagccttctctaatcacgctcccgacgtccagagtggagccgagaatttctattatggaactcaaatggacagctctcgcccacctactactatgtatgctccgcagcaggtgaacggcgatgggttccaagttccatccacctacccatcacaagctcaacatggtgccccgacaaatgagtcttatggtcagaattggggtggaaatacctacccggcccttggatcacctccacctagcaatggcattccaaataactatgccaatgccccaacgcccagtgccccggctcaatattacgcagcaccacacgaccaagacacagccaggtcacccggcgcagaatccccataccagccgtcgcccattatgcgccgggactcctctcagtatcaggccggtgcaactcccagcggtccaacccccgctcccgaacaacacgcatctgccgggtatgtgcaatcgccgggctattctgtgccacccactgcgccagcacttcatcagcaggcaacgggcccttctcagtcttactattacccgtcacaaccccagcctcaacaacctcctaatgctgtgtcatctgcataccctccgattaacgctggacaaccggggtcgtatggacaggaaacttcgcaaccgccttatcagcaaccagcacggcccgtggaggaaaacctgattgagctatagcgtcattatacttcgttcggcgttatctatgttttcatattttgcgtttttttttcgcctcatgatacctgaagacttttagcagattgaatgtgtagcttgaagtgggtgaatgaagggatctcaagtatacacgaaaagacactgcctattgccagtggctaatgctgccaatagttatttccaatatcctctagagctctctacattcttaagagtgcattttaaattatttatgtagctgggagacgacctggattgttccatttatagaagagcctcgccgctgccttaggcattccacaatattgttaccgctctttaatcgccgaagacagcgacctcgctctccctcttcttcactactctaatttgccccggatttctctcctgctcttattcttttcgcattccatttgatttttcgttcattattagcggttcgaaccggtgtaacccggctttcagcttttgagtcttgattgctttttgcctgcatgccctctaatctgccgtgagacctcttgaacgacttgcctcggccaatcgccacactctatgctctgtgaccaccgctgattacccgcctgtggctcctctggggtctttttgcttaccgccatgcctacctctaacgcttcaaatacctcttcccctgttaagcgccccggcctcggtcgccgtgcagtgtcctcccatgcagttgtcacgcgcagcgccaatcctaatgacctgtcggtgtctcacacgcagaaagcacccctacatcataaacctcaccgcacccatgttgttggagctcaccgtaaccaccaccgcaacccctctaccggcaaaaacttcaacaaactccaacgtctccaagtagcagctcccgagactggtgggcggcaccatcagcgcaagaagtcagcccccgcaaccccgatcgcgagtccaaaggaaagcgggcacgttcgctgggatccggttgtaaatgaccatacaaccgatccttccatgaagcgaaacttttccactcctgtgttgcgacggaatccatcagccgttgggaagaaagcgttggtgactgagcgaccgccctccagcgcgttaaagaaaaagtcggtcggctttgagctgggggatgacgagactgacgacgctgagtgggaagataccacacagtcacccgaaagtacgaggcgcaactcggtggcaccatccaatcccagcgcagacaatagtaccgttcttgtcgaccaccttaccttcgtcaagcgaccatacccccaaatgcctcgagcgaccagtctgcccgagtcgatcaccaccaagtttgtccgagagcgtactgaactgcatgaggatgaggttgcggatgaggaagccgagcagcacgatgaggaagaagaagccgaggagtccagtcagcacacggagcagggcgacatagcagcccggctgctaagtcctacgcactcatccaaagcgccccctgccatgtcttctatctcggctatggtgaagccggaagccaatagtctcaataccccgtcgcgtagtagcgcatctctcaacctggctgctggccaggacaacgctcggcgcacattgtcgtcaaccagcatggccagcatgccgggctctcaaccccaagctacctcatcctctatggaaggtggagtctccaggttcattttggacaacaagaatagcgttgaggaatcttctcgcaacgattcggacccgaatactccctcgtcgttcctcccacactaccaccccgacacaccgccctctccaactagtgcagcggccaagatgatcgcgtctcctgcgcggccgcgtggtgctgacctgccttctcgcacgcaacagaagctctggctgcaacgtaccgctaccctgaataactcacctcctgataaccatggagtgaccgcagcagttccgccgtctaccattgacccgacatttatcgccgctaaccacagcacgtatgacgccgccagggggctcaacggtgacggccgagctggcggtgcaggacatgacagcgaaacccgtcatatccgcaaggcgtatgagaagacatccctagaactaatggtcgtgcgacgtttccagtctcccaccggtcagagcttcgctcgtcttcgtcatatcgtccgagccaagaaagcggagcaaggatcagctcttatcaaagcagtccaatcagcaccttcgctgtcccttttgcagcaaagcaagcagcccactcgtcttagcaccagccctacatctaaatcccagccgcgtaatccaacccgcactgcatctgaagatccagcgacaaataacgaacatcccaataccacaaatgctaccaaggccaacgacccatcccaccgcatcttctccacttcaaccgaagcttcacgtggcccgaatggtgacaacgacgaaggatttgagcttaacgacagcgccatgttgatccgccggatgtgggagagccgagaggtcgccatccacggctaatttatgatttgtttcaccccttttatgtttatgacggttcactctatggttgttcggcgctcgcattctgtttttttttttatcacagcgatcaggttgaacataatttatccttgttctttttgctttcctgccctgcacctctattatgttgatatgagtagccaatgccacgaatttccatggtaatcacaacccacacagcccactaagcccactaatgtcccttgtcgatccaaaacaaatcggccgcctgggagtggcctggtcggctgttgtccttgcaccggctgctctgacttccggggaagggctgcatggcctgacctgctgattaatcgccaatcccgctctcctgatttgccctacaaaaccctaactagatggcctcatactccagacttcttcagacttctgtttcgtttggaatatactaggaaagccatcatggatctcgtcctgctggtaacaggtcaagtcctgcgcgccgcatactataccgccggacttgttctggtgtcaatcgtcctcaatgtgatcaaccagctcgtcttctacaacagaaaagagccacctgttgtctttcactggattccttttattggaagtacagtggcctatggcatggatccgtaccagttcttcttcgcttctcgtgccaaggtgtgtagatcttgcacctcttgatgcttccgtaatgaaaggtgacgcctactaatgaacggacttagtacggcgatatcttcactttcattctgctaggcaagaagacaaccgtatatctcggtgtcgagggcaatgagttcatcctcaatggaaagttgaaggatgtcaacgccgaagaagtctacggcaagcttacaacgcccgtcttcggatctgatgttgtctacgattgtcctaattctaaacttatggagcaaaagaaggtatatccccttctgccacttattacaaatctcatatccagagctaatccaatcctaaacagttcatcaaatacggcttaagccaagaagccctagaatcctatgtccccctaatcgccgacgaaacaaatgcctacataaaatcatcccccaacttcaaaggccaatccggtactattgacctcgccgctgccatggccgagataaccgtcttcacagcagctcgcaccctccaaggcgaagaagtccgcgccaaaatgacctccgagttcgccgagctcttccacgaccttgacctcggcttctccccgataaacttcatgctcccctgggcccctctcccccacaaccgcaagcgagataaagcacacggacgtatgcgcgagatctacctcgagatcatccaagcgcgacgcgaagccggcgaacaagacaacctcaccggcagggataaagccaaaggcacagacatgatctcgaacctgatgcgctgcgtgtaccgcgacgggacaccaatcccagacaaggagatcgctcatatgatgatcacgctgctgatggcgggccagcactcctcgtccgcaatcagctgctggatccttctgcgactcgcctcacagcccgagatgacagagaagttgtacgcggaacagatccagaacttgggcgctgatctcccgccgctgcagtacaaggatatggataagcttcccctgcaccacaacgtcatcaaagagacgctgcgtatccactcgtctattcatacgcttatgcgcaaagtgaagaatcccatgccggtgcctgggactgactttgttgttccgccgtcgcatgtactgctgtcttcgcctggtgttacggcacgggatgcgcggcatttccgtgatccgttgcggtggaatccgcatcgctgggagactcgggttgaggttgaggattcttcggataccgtggattatgggtatggcgctgtctctaagggaacgcgcagtccgtacttgcccttcggcgctggaagacatcgttgtattggtgagaagtttgcgtatcttaatttggaggttatagtcgccacgcttgtgagggagttcaagtttttcaatcctgaagggatggagggggtgccggatacggattattcggtaagtcttttggtttcttttggcttgggttgatggggacatgggctgacttctttctagtctctcttttcacgtcctatgcagccggcgactgtgcgatgggaagtccgctcgtaaggcttgggaacactattagtcttagtcttagtctcggcgagtcaacttttgtttatgaaaaatgtttgtatctttaaagagaggagaggtcataagttcagaagtaatttatcaataataggcagtatatccatctattccggtcttttgtaagtgaccagtacttcaatcgaacgccatatttacccagacagcttctaaattgataaacaagaccgaacatggtggataggtgaaaggggggggggaggggtatgagtagatggtatgagatttcaatgaaagaactaatggtattgtagttcaaaagcaatcatatctcggtggaaattgaatggaagctgaaaacgtacatgaagaaaagccattgagagaatgaatgccttcttctcatgttgttatgcgtcgttcttgcccctaccgcgttgattgccgcctccacggcgaccattggcattcccagaaacatctccagcacgatttttattcggtgctctttgagactgagctggggcctgaccactctgattcgtcttggggtttgtatgcccagagcctggagccgatacgcgcctgtgctcttgaggagcaggtccatcaccggtgtttttgttggctcgacgcttacgcgggccactggcagcgctagatgtcttgccgcctcgtccaccctttccagggcgaggttcatttggctccgggtctaccagtccttgcacacgcttactttcttggtcccaccactgctggaactcctgctcggcttggatctcttgcattttgtgcttggcggtggctgcttcccgaatcgcttccttttctgtttgttgctggagcaaaatggccgacagagagtacgaaccagagggtgaagagcgtgatcctgttaggtcagggcgtgggatgtgacgaattgactggatgactggctgtggtgatgatggttgattgttgggaggtactgtagaaggtcccggtgcggaaggtttcgaatgagaatagggctgtgggttccctgacacactacggcgttgtgtttgcacgggtgtagccactgtctttgactttgacggcggcgtgccagccacagtctgccgcatagtcatggacctttgaggtgatgatttaacagcctgagatgctggggcgctttgacctgggagagggtcgagtttagggagcgacgctggagaagaagctgctggcttttgccaggggttctgtggtgcctccttcgccttctgctgggcagccagctgatcttgtatctgttgttgctgaagcttctttcgctccttctgagagatcttaggcacgaagttaccgctgctttcgcgtcgatctgccatgcctagcgtgagattggatacccgagactgtaatgcttctcccatgatgtctttgatatccttcttggaactagaaatcattggcgaggtccatggcgcagaagagggattagatgacgatgctagggcttgtttttggttttttgtcatcgccctggactcagatggggactgtagtagcggatcttgtggggaagacatctgatccttcaagaaaccatactcaccgaaggactcggcctctgggacgcttgcccccaaagctggggagtcagggtatgattgattttcaggtatgccttctgtgaacctgagttcacgcatgacacccttgcctttcgaagcacttggtgatatgagggcctcgtcgtccatttgaaacatgagatcaccaaccgacggtctcgacttcagcattgggctattaccaacatttggtgactcccgggatacactgttcttcgccttgcgtgcagacggagatgaggtacccttctcgttatgcattgaccgggttcgcgcatcgtcatacggctcgaaacgaccaaggcgggactgcaaagtcatggcatcgatccttcgttgcttatctgcttccacggagctgacaagttcggggtatttctcgaagacatactcctcagaattgcgcccacgggatatgggccagcacgccaactgattttcgtgacagatcagatccaactcccaaagcagagtaggatccagatcttcgagatatctgttagcgagcatggcctcgagatttagacagatatattccagggcagcatccttgaactctgtgacacagcaaggggcaattgaattgagcaaatagcacacgtttcgcgttgtgacgaaacgaccgagcatcttctgacatacttgagatagtcggtcgatcatcagctcatttgccacgaacatgacatccagaagcaagtcaatgaaatcatcaacatctccaatccgtacttcatcaaacagtcggtcttccgtatcggcatataggtaacgcaggacgaattcaaatgtcgagcgatcaatgtgctttaggtcgacatgcacgctctggtttgggtccgccttgcgcgagtctagccaccttccacccgcatgaccatggaagagtgtgtcaaagaacggacatctctggcacacgacttgactgtgcactttgattgtatcgcctttgagctgaagagtcacgtctgcgctgtcaaataagaacgagtgattgatggcatgggccatgtcgattttcaggctcctttgcggctcgaccattagtcgtgctgcccgctccagcgctggcaggcctagttgcatagaaacccgcataacttcagtgcgaacctgccggaaacgggccgagtttgcgggcgagctccttgccaggcgccagacatcgagaataccgtctgtgtaaaggaaaaagaccacgttcataacggtcaaaaaatcaacaccttgaaggcagatctgcggatgtccgtccttcccgtattcaataccaaaaacgtcggggacggatgaataatatgactggcggaactcggccaatgcctttcccagaataggaatgcggccagctatgagaaattcatgaacaggaatacaagagtcggatagggagctggtcacccaaacagtcccctcgctccgtacagaaagaaattggctttcaatatccgatgatgaaaggatggctctttggatgctttttccggatgaaagtacaagagggatattcttagcgtcatcttcgaggatcgagtccaactcttccagacctggggttgaaaacggggacaacggcaacatatcatcccaaaggctgctttgctcgacattaatttgttccctggtcacttcgcagtcacgttgagccacggcgtaggccccaaacgcattgctgcgcactgccactgcccgtgagagaccaggtatgcgggcaaatttatattctttcgacgctccctccttgttctttgtccgccgttcttttctccacgcagatccagatgttgtacagatgataatcgatccgtcttgtccaacatcaacatcactcgctgccatgtatgatttcttaacggaccatgctttaacaggggcggctaatgaatttcgaatctttgcaggattggttgtggacgttaaagccgaagagttatcggactggttggcttgaacagtgaatacatcaccagagctggataatgcacatatggtgttgcctccacacacaatcttgacaacacggtttgcagtcttgtcgtatctggttgccatgaagctatccctgataaatctggagctcacttctagtgggaatgaaagctttgaatagccatatgatgagaaaacccaaacttcgtggttctgcagaagcacagacgtagcacggtcaatggcggacaccatcttgattggacaactgaaaagagatgctccaacgcgccgtggtgtcgtttgtatctcaagcgaacgcgcatcggaatcgaccaagccaagttgaccttcgttcttgccaaacgtatagagaccagaggtactgaagaccaccgagtgaatagatgacgctgctgcacctatgatcgtctctttcttgaacggattgaaaatctggcgaggagtcgtctggatgggaatgtcgtttttgttgctagtcctaggaaggccatagccaagttgtccgaacttgttgcttccccagctgaagatctcaccctgctcggtgattgccaggctatggtcttgacccagagcagccgataagactttcttcccctctagtccacctgtctcaatacaagcaaaggtgaaacgcgtcgactcatctcccgttcctaggcgccctccaggaccgaatccacacatgaacagattagcctcggggtcatctgtgattatggcagtatgcagtttggacataataatgtcttggaacttcattggcttgtttgtgatcaaagtgggcagctcggtcgttttggtcttaggcacggtatcttcgagccctaggtgttccaatttctcgtgatattcacgataaaatcgatgcaaaagatgctcagggcgcttcaatgagatgcgctcaggaaattgtctgtcatcctgatcccctaaaccaaggttcaggtttttgttgcttcctaatgtgaagacttcatcggcggcaagatccacggcccctttcaggacactcctaagagtgtatgccccatcttccccatcatctccgaagttcgacgcagcattggaagcaacatcgctgccgagggcatcatcatcattatatgaacttggccagttttcagagatatgcttaatgtcgcgggctctaatagtcgccccgaagacatcaaaaggactgcaaccctcacgatccttgatcttgataaggccaccacttggatggctcgtatttccacctttgctgaaatctgtcatgtcctgcagatcgcgcgccatgagcgccagagcaattgtggcgttcccggcataaagagcccgatgcagagccgtccacccactctcccagtcctgcgcatatatatcgataaacggaacttctaacaaagcacgtgcaaatttggacgcggtaggtctcgaggacgaagcgacatggtgcagcagtgtacggccgtaatgatcacgggcgttaacatcggcacgcgacaaagtcgcgctcccacgcggtaaggccgcccggtcaggcacaaaggccccaggggatgatgcgatattctttttatttctcggtatatttggagacgaagcaatcatggacccagggcttccagctttcgatgacaggtttgtcgcagctctggaggtccctcctgagcctccggcagctcgcggacccgcgaacgtcgcgttcgccagagaccgctggaaccgctcgacatcatcttgaatgaaacactcccaaagcttattactcatgtgcccggagtggtcgacgcgccgaatctcttatcaggcccaagctgagcgtcgccgtcaccacagtggggtggaccgcgacgggggagctaggtgataagagaactctggttcaaggggaagggtaggaattgccgacgctatgggtataggtcgacgcgatcgtggtgtcacaatttttgatcgtggatttgacgcgaaatggattgtgggctcggggtttgcgcgtgtggcgaacgggcttatttgcgggcaactcgaaagttttgaggaagaggaacgaccttgggagggatgctcgacggagttggaagatctgcaatgtctcgagatgtctagatggttggaagaagcaagatgtcttgagtcgcacttagcagaaatccagccggtttgccctccatgtcatccgtggatcgtggagcactgcgcagtggacgataatgacctccgggcccaaaccccacaaatacagtaagtagtagtacatctatatcgagggttcggacttcccaaactgctctgaatatgtagttaaacatgtcttttaaatgagtaacatagatctaaaagcttatagactcaacaacttgccttgtaagccattatcggcttccaaagcactccgtagaatgtaaagaacatagccaataagctatatactacgagaatccgtattatattcccagtggacgttatcaccgtctctttccaacctctggccaataacgacgcgcacgtccctccatgcccccggacgagaggcgaggatcatccagggcagagcccgtggggaactgataggatgatgttgtatgtatgacatttcatttcatttcggatttctcatctagaatggcctgacatgcagatcagatctctcatctagaatggcctgacatgcagatcagatctacatcataatctttcgaccaatttccaagtccggaatccccgtcttcagctgtgcacgtcgccggctcagcgccgcattctcccccgcaatctccgtcaactgatcctccgtcgggttcgcaacagactgaggcgagaaaagtccaagcggcttgcgtggtcgggtgaacagaaagtagccggtggctttgagtgcagatgttgtcgacaaaccgcttagatgcaacatcgtagtaggcagccaagatgtcatgaatgtaacgaacagtgctctcggtgttgctcattggagcttttgcctcgtcgtcggtaggctcatacttctcccggtggctggtggaaagatgtcagtgtatctcgtaagtcgattaggttagtcagacacaccttctcttttgagtttcctcaaggctctcataaaatccgtcattcaatgtcgttatgttcatgcgctcgacatcaagaaccagcttggcctgctccattgcttctctgtatcgcttcgacagctcatcagcgagaacactcaccagtttgtcgcaaatttgctcatccgggcaggtgactccaaggactttgagaataaaggcatgcatgatttcgatcacatccctaacatatccgagcgcgaggtcggcccgtttcccagattgccggttcatgatggtgcacaataaagagggcggaaatgtccccacttcgaatccgcgagaagtacaatactggtcctcgatccatgcaagaatgctgtcggttgtgggcttttccacaatctcttgctcgtgaagaatgccatcaatagcgccactgttgtccaacacacccatgtgcttgcgaacagtgatttcgccaccatcttcctcatcctcctcatcttggatatcggaaatctcactgacgaactggtattcaagcccatattcttccatttcggacttcaaaccttccatgcggtttctgactattgttgtcagtcgggtatccttctctttgtcgaacaattcatgtgtgccgtatgaagttgtcatggcctgcgaaacaatatcttgaaatcgagctatgaaatcgagcaggaagcttctctgctactccggggtacttcgctcatttccaaaagcagacaaatcatgcctcatggccttcggctttcgaccaacatcggtacgcatctgcatatcaagtcagccaaatctacaaacaaaacgccagacggtgtggcataccttaggaaactctcgacgaatttgagtcgtttgcacctcttgcaggcgaatcttgagggcatgaattccaactttgtccttcggaaggttgctccatgggtgattctcccgaaagaaccgggcctcgaccaagtctcggtcagaactctgatcaagtagctgttgctgggcggcattgcgcacaacaatccagccaagcggtaaggaatgagatttgccctcaaccaagtcgatgaccttgttttcagcccccttgtctaccaaatcgggtttagtcaacactcccagggtgcgaatttcctcgggatcgcactcctgcgccatctcgaggatctcgtgtggctatgtccacatttgcgggaacgaggtttgcgcatgtagcccaggaccatcttcttcaccatctccatatccagcttggtagtgagaccagatgcagtgttcttgaaaatacctgggacatcaatgatactcaaattatcttcttcgggtccacagatctccaaccggaagacatcttgagtgaaggtgggcttgaaagggtcggtttccgagcccgataaacccatggtctggtgaatctatagtaataactagtcattacaagggcttcagttatgatttgctcaagcagcgaaacttacctcttccatggtttcagcgaaagattggggtcgagtgattccatattggctccttgccatgctgccaagcgagaagcgtgctctgggtctgtgtcgggtgctggaacgatagaggcagtgacagtcctctttttgtccgctttgatccgtcggaagatgatgtgagtagcaaactgagtgcaaagtccactatccctggggaacggcaacttggtaagccccttaagaacggagctttttccactggattggtctcccgcaacaacaagctggggcaagttgacgtattcaccaaggttgtaggctaggagccggtcaatcttgtccagcagaactgggtcaccgagcccttggccaggcaactttggagtagacataacggccacggtggtaggggatgaaaatgtgtgacgttagaaggttggatttatatcatcttctgaatgaataaaaggagagaaatggtgagtgagaatgggaaatagatggggggaaggagaaaatatccattcctgtatatctttcaacttggactaggtttccagaactttccgatgatctatgatagcaatcatatcctcttcatctacccagtttcaatggagtcgcattctttgagtctttattagcacccaattgagaatcacctcttagcaaactgatagattcaaagaattatcattatacatacttcctgtgctctttctaacatatagcattatgtttgttttagaagtcactccccaaacattttttcactgacccccgtacgcagtattacggcgttcgatggtcaaaccccggcggtgtccggttggattggaactcgaagccaacaagttgagttgttcgtcaagttggacagctccgggttttgaccatcgaacgcattcgttcgcataaggaaattgcttccgaacgtagtcctgaaggtccgcccatgccgcttgctctttgcgccgttaatcgtcgcgtacaccgtaccaacaggccgcccttcttccttgctgaaacggctagtaaaagccgacagatcggggccgtaccactctaggcatttgttcaactggcggctgacaacaaaggatctatcatggaccccaagattccggaatccgtactttccacttccttccattcacatgagcggttctttgctcataacgtcaaagaagatctctgaaaccgaacgccccttcacaggggggtcgtaaataccgccgccatcaacaaacggtcttgttgcgttgcatggcgcaatatcgcgccgcattccattacggaaagcaaagacaagaagcagaacaccttcggcataatttatcgtcatgtgtagagacaactccttgatagtaacggtgtcgaatgacgatcaatcatgccgaaggtgctcgggagtacagcgtacttatccgctgacgacggaccttggacatagatcgttcagtgatcgagaatattgaccttcggtatctggtaggaccgatcaaactgcgcgggtatcaactgcacaggtacactccgtggggggccacgcttcgcctttttaacagcgcgttgcactttagcctcgatatacttgtcgagagaacctcgggtatacttcgaagaagtacgaccgcccccccggcccnnnnnnnnnnnnnnnnnnnnnnnnnnnnnnnnnnnnnnnnnnnnnnnnnnnnnnnnnnnnnnnnnnnnnnnnnnnnnnnnnnnnnnnnnnnnnnnnnnnnnnnnnnnnnnnnnnnnnnnnnattgctggaagaaggcccgcccgccgcgacggcggcggtattagctcttagccttaccggcccaggatttcttaccagttttgaaagccatttttgttatttagaaagtttaacagatttagaatgaaaagggactaccgtgccatactatatcatatataatataacattggcggaatgccaagaattcccctatcggatcattttctcagagttccagtctttagttacttagaatatcctttcttagatacagttacaacttgaccgtctatatactataggcaatactatcatattacccgagactaaccccttctgactggttagcttacacttatctgactaatagttagtatctccttctaccgactggtaactaggtccctcctattcctaaattttacctaatcggggaaatacgttgagactcagactcaagtttttagggcaaagtaatagtagaagtgggtccacttcattgaaaaaagtctgtccaattagattcaacttgataaacaactccacttggttgctgcgagttccaatcctaccggacaccgccgggttttgaccatcatacgtacagtacatgggtatcagatataataaggtttgcgggccgaacccatgttctccgtacccgagctcctctgccaaaattattgtttaggttaactatttcagtgcacatactaaattatttgcatataacaatacaatggggcagactatctgtgtgatactaggacattcaggcccgaaggatcttccctgtcgttcagtcacctatatcaccgggaaatccattagatagtccttgataacaaaatattgggagcgatcatctagctatccaactatccatttagtagtttaaagaactaatttttgttcttttcgtacttggattaatttcaacccttttgaatattaagtatactgaaatgaaaatgtggcataatcacaggtgagaataaatttttgttcgacttctccgatctagcccgagggctcggaatggagcggcggtcgccccagcaggttggagtaatctcttgttagagacttggatggtaaaaagatatattaaaaagcaaagtcggacacagctggatcgcaaagtcaaagtaagcagaatccgcacaggttattcacatctttttcgtcactcccagagccctccaatgccctatcaaacccccagtgcaatggatgccgcgaagaagagcaccaagctcgcttgctatcccaactgtttgcacaatttctgcagccaccctcgatgcttcaatctaactacttgtctcacttacacagactgtcatgtatgcggttcgagaaagtattttattgaggtttggaggctttaggaagttggagccggggattcagcagcctcttcctgggcatatttggcttcggcgctagcaaaggcagcgtccagctccgtgcaaggctcatagctgccgataccaacaactccgtcatccttgtccttcagacagtaccctccattttcggggaatagagagccgtaaggttgatctttggccatgtcgtggagggcctgtctatcgatgaggataatagagtcacttggaggcgtggcctcgtcgcgggtgagggcttcaaccatggcggtaaaaaggcagaggaagggcacgatggagatgaaagtgaatttcatatcgaatgaggggcacataaggatccctgtaacgagtatgtgtcttagtcatctctttttatggtccacaggtgtatcgtgaaatcttgaggcataggttgcccttgaacataccttatgattgattgaaaggaagtatgagactatgatagcgatggaaacatgatgtcttctttatagcacttggatgtgactaggtcagtcaactgtcctccctgcagacaactatatagtcaatgataagtaatcatatcacgttgaatgctctttgcaagtgtgcccatttttcagttatttcaaggattcatgcagccaccgccccaggacggaggggtgacatgcattcatgagaggtttcgcccggtattacgaggctagagggttggaatgatctaagacataccagggtctttcgaggatagggtgttcaatggattgttgctgtctttgtggcttttgtggtggaactgtgagaatgtccgagataggcatacaatacatgtatatcccctagtcaaacatcccaatataaacaagccctgaccggcgggagatgccgccgttccggatgtatacgactacaggaaggacatattcaagtcgtctgaaatagttgatttgaggattgctagagttgctttgggaaacataatactatgacatcaatacccttcaatatatatgttagcgcttggacgccgaaaacataccaactatgcccagcttgaacacacccatggacctatatagacagatgacctcttggaaatgcctgctagtaaaataaattgtttataattttgtagtacgaaaccagatatatttagtgagtgaggctaaccaaaaaaagaaaaaaaaaagacaatgaggctgacccgatttgaacggataaccttgcgaactggagtcgcacgcgctaccgttgcgccacagccccttgttcgtgatatttaacataatgattagtatgttaaaggaaaaattgttatccaacccttcactagcctcatgctacgtagacatatactctgactgaacgaataatttcgaaataggtatagaagcagtcagcccttgagagcaatggacttagtaattatgatagcttggatcactgttagcatttgttatctcatgggtagcaagtggctgcgctaatttatagattgacctctttgttagaccaattacaggactacgaggcatccatttgaggatgctataacagcttcctatggcttggttccgttgttccgtttatcttgggctgatttttatctgtctagtctactccacatgagcttctttgaatttcatacggaaatgccttattgtagggccccaatagtacataacccgaaagatttccggcttgatgggtgaatttgagggatttgggcgatattttcaaaaatggtgaatatgccttcttttttcctcctcctgttgttttccttctggaattgtatatgtggcgcccctgaagagagtttcttcaacaatatgtgatccactactactccgtatgcgaaaaattcagctccgggccctccgatgtacggagtacgggtgggtcttcactctaaaactaagaggcaaaattagtcaaagtcctgaatcccggcgagattataagagtaaacccacaagagcttagttagacagcgcgtaagcctaaggtctgcagcagtttagaagagctgctcgggatgatcaattgtggggctaaactagcgcatcccacagctcatccattattctgggatttggtgaagaaataaagctggaaaatgttgaccgaaggctgaaatcataacaaagaatagaagctataccgaaccaaagaccatatgcctttaaaacataaaaaaaagttgaggatgtccatcgctattgaccatggactcgatctcacccgggtataaccataggatgttgtatgtccacgtgcatatcataaactagatccctatatcacttacaacatatgctcccctctatcctctcatttctgcttctaccaatcggtcttgtatcctattccaaacctcacttctgattaagctccacacttaccaaaaggggaagtgtcatctgcctcccaacatctctggaattttgtctcgacagaatgaagctgaaaagtgcaacccaagtcctttcatgtgaagcgccaatacaaagttagcgtcagcatcttatgcaagagcctgctttttgcaagatatcctccgcatcttgaggggtaacgctaagacaatgccggggtagagccctcatgcgcaactaattgggtatatacggatgtaggatatggagctaaacgtgcttactctggctcgagtcgtattcactacgtatctgtcgcagaagaggtttctccgatacaaatgtctcaataatcagcctcggatattggatatcatgccccccagacgggaacaaaaagaaactttgtgcggggttttggcgccgatcttccacgagtttgaaattttgttaggccccaacttctatttagatgctgaaggaaaaggaaggtaaagaggtgagtctatcgataagtgtatttgcatatcgacctgctaaatgtgttcacgcttctgtaggcagaagatatcaaacaaacctcatatcagggagtctgaaaggcatcagacagaccatgtattgctccgaatggtttatgcacggagtatcccccgttgccatgaacaggtgatgatcgtcgcactgttcaccggcctcggtaatctatatcaatcacattcttagaagttgtttaagtatataatatgagaatcgtcccgctctatcatgtagaataacggccttgaatcccttatatagagcaggaaaatggcattgtcccttgcgctcatggtgcgcctagccctggttggcctcgtggtattcacttcaattgcctcagccctgccggcgcctcaagtccctcgcagcacggttcaggaccccgacactgatccgttctatcagccacctgctggcttcgcatccgaggcgcctgggacaatcctgaaccaacgcaacatcactgccgcgttctttggtctcgtcccggttgacgtggaagcctaccagctgctttaccgcacgactgcaatcaatggctcggctattgcaacagtcaccacggtgtttaagccgaaggacgctaagcttgatcgtttcgtttccttcgccacggcctacgatagctctgcgacgaaatgtcagcctagctacacctaccagcttggttcgccacaggacagtttgattgcttcggtcgagctattgatcattgatatctaccttgctcttggttacaccgtcgcttctcctgactatgagggacccgaggctgcctttggacctggtcgcctcgcaggtatgggtgtattggatggcatacgtgccgtgaagagcttcaagacgttgagtcttactgatgaccccatggttgtcggtataggctattcaggtggtgccattgctaccggatgggcggcctctctgcaacccctctacgcgtcagagctgaacatcaagggctgggcgcagggtggaactcccgcgaacgtcactggcacaatgtatcagcttgacaacacagccttcagtggcttactccccccagctattgctggtctcataaagccaagcgcctatggtgcttcgctgggccctttcatcagcgagatcataacggctgaaggccaacagatactcgatgccgccgttgccgaatgcgccactgcggatatcgcggcgttcttcgaacggtcaatcttcgacactagcttccaaacgctaggcgaaaattttattttcgacccgatcgctcagtcggtactaaagcagaacaccatggctgccaacgaggacgagaccccgacggcgccaacctttgtgtaccacgccacagacgacgaagtcattccttatgccgatgccaagactatggtcaattcctggtgtaactggagtgcaaatgtcaagtttactacttatgccagcggtggtcatgcgaccactgaaatcattgccattcccgatgtcatcaattttgtccaggatgcctttgctggcacgaccgcaagtggctgcaccacgaataccgagcttggtagtattcttaacccacttgctcttggtgtggatcttgagccaattcttgtggagctcattgatgcgctgttcaatctgggcgatcaggactcgaaggtcaagaacgaccccgttggagtgctcggcacaagcctttaagcgaatgctgacatctattatcattggtcctgatgagcgttgagggtttgagccgcaactgtttctgatatgcacatggttattcgctctgccacctttggtgtctttgtttcctttggctaggctttggtatcctttgtgggacattataaccttttctgtcagcacataatgtttctcaccaacaatgagaaggcagacttccgagtcgagcttgtgttgatcaatggaatgaagtccacaggatatgacgttggatcagataacggtgtgacctgccaaaatatagtatggggaaatcttggaagatgtcaaagtactcagatataaaggatccatcagctgcctatacctggctgtctgtagcctccaagtagaacgtcttgatatcacgccttgtaagtcgtgatcaagcgcttatcggttccaggggaccttgccccgggtacggcgatccttgcgaccgtgcatgacacccggcttgtccaacagcctgtttccaggtaaaaggaagttatacaagtgaaaggagaacaggagcctagtttatcaagaagataggcagccaaccccccgtgtttgcatcatctgtgtggcgttctaggctgactaggacactcgagacctgtcgagtcaccggatgtgcgtcacagacgaactatcttcattatcacaccccttctctctctctttctccgcatccacctgctttctcattcttttcttacgagctttatcatatttctctcgcttctctacacccctcacggtgattttatccaactgcatttgcccgtgcggagaagctctagacctgccccgaaggtcccaggccggagtcaaccccagaccacatgctaggcgcccattgtctcattgtgaatcatttagcgtctcagattcaggaacattcttagaagattatcatcaccttctctgttagcatggccctcagtcttggatccatcgctgcccgattgcgttcctgataacagattccggcggtgataacactcatatccagcactccccggtaatgccgttcttacctcttgttcgcatgcatgtcgatggtcgctaaccacggtgtcgcaactagaagaccaccatgcatcaacatccccgatcatcggcggtgccgtctccgccgccaaaccttccacccagaccgacagctcgggacgtccgcagagaacaggaaaccgccccgagctccccaacggtcgatatggggtctaattatgccagggggctggggttagagccgggacctcaaccgtccgagcaggggaggaatgcggcattgggcaaggaggccctgacccggttaaaccagataatatcggtatcgtcattcagatcgcccctctcatggcttatcaggatagctcattgacggctaatctccttttcaacagaactatcacacaaaagccgctttgattatcctacattcacgagttgcactgcctccctcctttaacaagggctccgattctcctagagtcaaccgctgggtatgtttccaagtcatggtcggattcgcgatgctttttgggatatcaaggcacatgaaagtggcaggcgctaactctgtttgtttccctccagttcaatgtcgagttagatgatacagatgtccttcgggaacccctgcgaccttggagaacatgcgatgcaacggacaaccgaccaccacccctcgttatcgaaacatacttagacacaaagggcctcacaaataatcaaagtctggtgattattgacgagaatgggaagcgttgggatgtgcgtgagtcgcttgcggcgcttcagggtgcccgtgcaaagccataccaatcggaaaatgacgagattatcttggagcggtggaaaatcgaattgggagagtgctccagcaggcctccggcagatttgggctctatcttgccgactgtgtataagaaaagcattgtgctcttccgttccttgttcacctactccaagttcttgcctgcatggagattctctagacgcaacaaaaagttgcgacagagtccggccctccagatcaagtatcgtgtggtagatgggagcgctgctcgtgataacctcccactggatcatttgacagccccgttgagcgagggaagcgaaaaagtggtggacacatacggctttggggtcacggagtcgcccgcaggtcccttctcagttcaagtcacgtatcggacgaactgcgatttccgtgttgacgactcagaagcgctactgagctcgcggtttatgggtgccgacgacgagatctttcgtccgtcgttgccttcagatgatgtcaaccgcccaaatcccgaagtcggttctgtgccagtggagagaagggccgttgagagcccagattgcacacgtgcatacggcagtctctccacctttcatcaggttggcccaacaacaggtgcaagtcctatatcagcactccgtgcaatgagagattcgggcgcgggatctccttcaccgacagagtcacctaagagactcctcccttctgccaaagtccttccttcaggacgtgcggcgcagattgctggtgaaagcggagggtcaagtttcccacgtcgtccctctgtctcattccaacccttcaaagctccccctctgtctgcttccccggctttagcagactctcccctgggaatgtctccccgcaacacgtcacgaatctccacaggtacatctgccgattcccgcgtcatgccgcccctttcttctgccgcttcagcgcgcagacctataaccatcgcatctgaacaagctatatcatcctctaattccgcatcccccaaacctgctccgatatcccgttacagcagttcctttagccaccgacgaggccgcctttccgtagggacaaacagactggaagacgacaactccagtggccgagcgagtgcgacatcatccaatgcacagcccgggtccggcctacttacggaagctacgggcacgagtgcggagtctattcacgcagatgacgagaatatctccgactttttgaagatgcttgattcgaaaaaggatctaatgaattcatccactgcatctcttcaacctggtcctaggcaggcgaaccccaccgcagtagctcttgctcgcttccgcggtatgcgagattcaaatgccgcgttgtccgactcaatgtcacagtctatgcacatgcatcgctcttctctttcttcgagcaagcaattgtcaggggtcccaccgatggttgcgggcacctccgtctccacagcttcttctccgggcaaacccatatctccccacactccccacacgcctgctatacgatctcgtctaagctcgaacagcgttgctgatgacattgagaccgaccaccgttcaagaatccctcgctcgcaccacgatccaccactcgaagaacattccagcgcagaaaatacgcgaggagcttcttctactgcaggggctattgatattccaacatcgccgcggattttcgaccctgcttaccgccgctcgagctccgcagccgtgcgccggccagtcgttaccagcgacgatgatgaaatattcccattcggcatgcgcagcctcagtctgggggccgatgagccctctcacgccaccctagctgccgcccaacagcacactgagtccctgaagagccaacaatcaccggccgagggtcgaagcggtccatcccgctctgcagcgggtccgtatcgggacagtgcatccctccgcggacagatgtctggaccaaccagcgcctcagcctcctccaacccccatgtctaccagccccggttcgccagctcccgtggccgcggctactcgggcggacattccgtcagctcagcatccagcagcctcgcccggggcgccaatcccgcgccgcatctggtggagcgcgaccatgaccgtgatggaaacgccagcggaagcaacagcggcaactccacgttagagatccgccgtggttccgggcagcggccgggcgcggttcggacgctttccggacaagcgcccgaagacgatgagccgctgctcttcgcgatgagcgactttggtgtctcgcggcgcagcctagatgaagttcgacacgggaaccacggtggggctgaatcggctgctgggtcccggcgcgggagtgggagacggggagcagggctcccgggcttccatgtttggtcttgaagtatgagtatacattggcattctaatgatgctttattttggatttctattctatcttaacctcctaggtctcttactcttccccacctccctctcaacatcatcttatacaggcgattgggcctccattcaatttttgacgtttgatttccttttaaaccatttcctacttgcgcggttggctgatttcatagattgaatactccaatcacagattgattactgcgatgtgcatagagattgggtctcgttattgttcggttttgtttcgggcgtttttttttcttgtttatttgtcgttttccttcttctttcttctctgactcctatttttgttttcacttcacttcgcttccgaagttctgggattgctttgctcatttgacatatcccctctctacatgattgatacgacttgatggtttcttgggggccgcgttttctccttatgactatatgattcttgatctatttgatgatgttggtggtttttacttggtagagttatattatctattaaaaaaaaattgaaacactttggattcgtgcaagggagaaaagattgtgcctataacggcaaaatatcacatggaacgattaagcacttccagggggctacatacttatcctgtgcgacatatccgagcccgccgtatttcagcgaaggcttggatagccatctctccgatgctacgcatgctaatggagaaaccgactgctctttgacaccgtcacacttaactagtaggtggccgagaaatggcccaattacttcctccacactccattcgggccggttctactatctaaactattctatacaaagggttaagtttagaccagatcctagctagaatatacccgcgttaagttagaggctctactgagttctaggaagccctaaggaaaacccggcacgtatagttacatatgtaccggataatgcctggcactcgagacctttccctttccgttttagtgctcacctcttgccgctttttgatcactgagtaaaacggagcacgtccctgagtaactagttagttaccctgacttgatcatgggccattatataatcaacgtgatctctgagtaactactgtgccacgtgatcaagtttaccagctgtgctgggctccttgatctccttcttcttcgacaactattgatatcacattctcctgtcggcttacggggagtaactctggaatgaacactataaggccgtccattcctcgtttgtccgctctacttcgcaataaaccgtttcccataccttctccggggctacctttaccgcccggtatactcgttgatgaagagatctcgccggtatacgattccaagtacttctacgcagcgaagcctggagaggtactcgctgatcgttaccaaaccctggttaaggttggctggtatatatcttcaacagtatggctcgtgtgtgatttgtaagggtagtctttaataatttctgtttaattcgaagctctctccatctctaataaatatataggtatatcgaaaagccagggagtgttatagtactaaaaatcgctaataacaatgcgagttccgctagtcatgagcgtggtattaaagagcacatttccaccgcagacccgtcacaccgaggccgctcacttatccgaatatctttagactcttttgaagttaaaggtccagaaggttcttatttgtgtcttatatatccgcctataagggagccattgtccatatatcagcggcgcttcgaggatagaaagataccactgcccctcattaaaacatacattcgtactcttcttacagggcttgattatctttataaagaatgcaggatagtttatacaggtaagttcatccttagccttatatcctgtcggtgatactaagcccaggcggcggcctagatctaaagcttaaaaacatcatggtctcattcgaggatccaaccgtacttactgatttcatgaattctgagctcgaaaaacaatggctttcaagattgatccgacgggacgacaagtgtatcagtcccgtaatgacttcgggccacttaaaagcctgagaagtataccacagcttatcgactttggcttggcaaccagactcgaggaagacgacgactggggcatctggcctattcagccagaccactatcgggcgccagaggtgatattgggtaatggatggcgaatgcctacggatatttggaatcttggtgttctagtacgtcccgcttttctctaaagttgttattatccactaatgccggaccagttgtgggatatgatcgaaggaaaagagctatttcggcatatccatgatcaacaaggtcgctagatgctaaactacacctcgccgaaatgatagctttactcggtccaccccctccagaggtcatacaaaggtatcaatatatgcgagagtactcgtggccggaacctgtcagacgagaagacgacagagtatgcgagatcgcggaggagtacttctgcggcccattctttgacagtaatggtatcactaggtttcctatcttgaacgaattattcttagactcacgaaatatcttaggtcgctttctttacgaagacctgatccccgaccggaaactatacgacacagtttccttccttgaaggaaaggagagggaagcgtttctggatctcgccaagggaatgcttgtctggcatccagatgcgagaaaaacggcaggcgaactggcggggcatccttttcttcaaccaaaacagacaagcgcctgattgctgcgagcgtttgctagcggaatgactcaaaatcgtggttgatcccagttcggcggttccatcaaatggtcagttgaagcgttaacgtagttgtctttttgaatgacatctaatagagtcagttgatctgtttttgatcggaaagtaatagcattatgccttaaatgggatcgaagacatcgaattaaatcaaataaatcaaattcccaaggtacccccaaaggggtatcacacccgttgaacattcgcgcgagcaacagaggaacagggtgaataaatcaattaaattaatggattgaagtccagaccctccatagcaggcagcctcctaaggaaacccggtacgtatagttacatatggattgctattgtatgtaaatgcacctaaacgctgacatcacattgtaagctcgtaccttccgtataaactatcgcctccctgtatgtaggtagtctgtggaatgccctatttgcctatttaatacgcgtcacagctatataagcagctcctttacttgtttgtagagaatcaactcttcttctctttccctccttcgctctctgagcgtcttaacatagttacgaacttcacatcaacaatcattcgcacaacaaaatgtttgatagaaccatctgttgctctttcttgcttttggctctgtctagtaagtttgacctcagcttgatcctattttgacctgattttgacctctcttttagctgcaatggtgattcgagaggagggggtcgagtccctagtggcgaaactcgtccgcctggctgaagagaagagaagggtgattgagtgatgagcaacgtggccagcaatctcatctggatgatcgttgtctgcgctgcggccctatagcgcattgaatttctcttactggacattgcggagattgttcgaccggtatgtcgctgtgtcccatgcacataatcttgcccgcatcgaattgtgaagttattctcacttcctcgatatcaccggacatccagctcaccagattccttttcagttggccctcactagagtatcagcccgctgcaatctcacctcggtagcgcacatctgaatgttttgtgtaaggtacacgactaacatatacatatctagaccagctcgttaaccagatgagggataacaaggctgtctaaggtatcttatctatatatacgctcagagctggtgaccgacgcagggattttctgacgctgacagaagagactttgatcctctgtgaaaaggaaactaattaccaaacaacgcgatatcatctttgaatggacagacaatcatcgtctcgcccaacgagtccctcgaaacaaacaggtgcagcgggaagacatctggcagctagctgcttagcacggtgctcgggcagatattgcccatctggcagatattgcacacttcagcaaggtgcggtaggagctctatgggactgtgattaccgattcgggcgcgctttcccctacagaagcggagtccaggagacccccggagcccgccgttgaaggatcgccgatatggattttctcgagaggattgaccttgttcatacgataaaccatcaccttctgggtttcttttcattttaaactatgatatactcgctgccaagcgacatcggcgtcgggagcgatgttaatatacgaagtaagtgataagacttgcgagtccactcaaaatatttgattctcgggagttgactgagcgtgttcgctggtaaggtttaaaaggcgaggtctcatgttagtttgaacgtacacttcataccttgtattggcctgtgctaagtagaggctcacttaaatcataggtagcagagagatatgaaaaggaaaaacaagtgacttcgttacggatcatgggcattccatggagacatctaaatacattgaacatccgatttttttaccctgctagcatacctcaacttaacacgcttatgcgatgtaggtcgaggccgacacgtcaccaccacggccggtccagttaacgtggatatccttgccctcggggaaggtctcgctggcatcctcgggcttgatgcggaaagtgtgggcaccgaagtagtcacgctgggcctggagcaggttggcgggcaagttcttggagcggtaaccgtcgtagaaggcgagcgcagtggagaaggccggagcggggataccccacaaagcggtcttgctgatcacgtgacgccagccagtctgggcgttgttaatggccttgttgaagaagtcgtcgaacagcaggttctcgaggtcggggttgctgcggtaggccttggtaatatccttgaggaagacggagcggatgatgcagccaccgcgccacatgagggcaatggaaggcttgttcagcttccacttgtactccttggcagcctatattggggacgagggttagaaaaccgactatcagtagcggataaaaaagacttacgttctggatgagcatgaagccctgggcgtaggagataatcttggaagcgtacagggcctgctcaaggtcgtcgatgaaagcctgcttgtcgccctcgaacttgggtgtgggaccgctcaggatggtgctggcacggccacgctcgtccttgagagcactgaggcagcgggagaagacggcctcaccgatcagggtaacgggcatgccgaggtccagagcgttgatggcggtccacttgccggtacccttctggccagccttgtcgaggatcttgtcaacgaggggagtgccatcgttgtcgttgtagtagaggatatcacgggtgatctcgaccaggaaagagtcgagaacaccgctgttccacttggcgaaaacatcaccaatctccttggaggagagaccgacaccgcgcttcaggatatcgtaggcctagatgacgtcagtgatcgctcgagaatatcttgcagcttgagaaggtagccttacctcgcagatcagctgcatatcaccgtactcaataccgttgtggaccatcttaacgtagtgaccggaaccctcgtcaccgacccagtcacagcaggcctcgccgtcgctcttggcagcgatgctctggaaaatgtccttaatgtggggccaagcggcctcgttaccaccgggcatgagagagggtccgtaacgggcaccctcctcaccaccggagacaccgctgccgacgaagctgatgcccttgccgttgaggtattgagtacggcggttgctgtcggggaagtgggagttaccaccgtcaatgatgatatcacccttctcgaggaaaggcaaaagggcctcgatgaagtcatcaacgggtttgccagccatgacgaggagcatgatacggcgggggcgcttgagcttggcgcagaactcttggatggagtgagcaccaatgatggacttgcctgttttgtagtgagcattttttgcaacggccattggaacctgttattctctggattgcttacccttagcctcgttcgccaagaagtggtcaaccttggagacggtgcggttgaaagcgcagacggtgaagccgtgatcagcaacgttcaggatgaggttctggcccataacggccagaccgatgaggccgaagtcagcactaggagcaaagtgcgccggagcaccgacattgatgccggcgagacgggcgctatcgtcagcgaacaatgtctcttgtcaacagatgggtaaaaaaatgacaatgggagcaaaagagaaaggaaagccgtgctcttctgaaaaaagatcagattcgcagtagctccattggtatcatcttgcgcgagcacctatagggattgggtcttccagatagagctgttgcatgatgtctgagcagcattgaagatccatgcgctctgttatccgtcgggaggcgtaaccgctgggctggaattggtgaaatggggaggaaagaaagatgacttacacagcttggtcagccatgacgattatatgtgagatatgatattgattaaaaaaacggtgaatctagagaagagaggaagatgaagagagagaggaggggaagaagaagaagtagctcggctgacggagcaagtcttccgtcatcctgtgggacataccgggggtaccgtgtaccagcgtggttcttactgtctccggtgtagcgccaagtactaagtacaggagcagagtcgtccggtgtcaacccactcgggttctgcgacaatttggaaagcattatccgacccggtttcaattccctatatgctacgtacatcctctgttggatttccggtttacacagctttatagtacatggcattgtagcttttactctgcaagagcggggcatggaggggtagcttggaactgaagaatgttatataacatagcaagtgtatagtaaggtatcaagcagatgatgaagtagcagaaactcaacccaatccccatgtaagtcacctaaaccatccacacatcccatcccaccattttccacgcatcggtgaactgttctggttgcgacggagaaatcacttgccgatgagttcataaccggctgcacatgggctaggccgctttgggactagagtgggggttacagcgcccacaacggcaatgactcagcaagagggctgggggggcttatgtcatagctgagtcaggaaagcttggttgagtcatgtgacacagccatcgcagacggcctggccagcgcatagacagagaagccatttctcatctctcggattttccattaagcgttgccatcccgcctaatatttcacgacgcgcatttttataatccttcaggccacttacagtgactataagcggcggaacctttcacctcttgcaagtgctcatctttcgggtgcctatctcaagcgtgacggtcagtcaggccctgaaggtacgttgcggttgctacttcgcatctagcattctcgtctctccatctctcgcatctcatttctctctcccccccccatttgaatatcccattcatcatgtcccttccgcctcctccaggtctcaaacagactccctcgtcacttccgccccgcccacctccatcctccaatgccgcgcagcctcccaccgccaatcctgcaggctatggcgggagaacccgaccannnnnnnnnnnnnnnnnnnnnnnnnnnnnnnnnnnnnnnnnnnnnnnnnnnnnnnnnnnnnnnnnnnnnnnnnnnnnnnnnnnnnnnnnnnnnnnnnnnnnnnnnnnnnnnnnnnnnnnnnnnnnnnnnnnnnnnnnnnnnnnnnnnnnnnnnnnnnnnnnnnnnnnnnnnnnnnnnnnnnnnnnnnnnnnnnnnnnnnnnnnnnnnnnnnnnnnnnnnnnnnnnnnnnnnnnnnnnnnnnnnnnnnnnnnnnnnnnnnnnnnnnnnnnnnnnnnnnnnnnnnnnnnnnnnnnnnnnnnnnnnnnnnnnnnnnnnnnnnnnnnnnnnnnnngccgtcacggcgtcccagccgcgcgcggtagcctccagtcaaccgcgtcgccccaacaactactcggtcgcgaatccgccagtctctgctggatacgcaacccccgtcaagagctacgtcaatcaatatcaacaacctcagacataccaaagtgggccttcctactatggacaacctcaatacgctgaaaacacatacggcccgaccgtcccacatattacgaacccgttcggatctacgcccaatacagggttttcacagggtggcaacgcccccggatttgacgcagagacggaagctcaaatcgcgcagtggcagagcgcctacaataggcccaccgatgaccccaagaatcaaggcaaccagccgggttcaggcgtgaacacgggagctggaaccccaaccctcggcgctggcactcctgcccagcaggccgagtcacaaaaaacagttattcgctctggtggtggtcagacatggaccgactcgaccctattggagtgggacccggcacatttccgactttttgtgggtaacctcgcaggtgaagtgacggatgagtctttactgaaggcattcgcctcctacacatcggtccagaaagctcgtgtcgtccgagagaaacgaacccagaagagcttaggctatgggttcgtcagtttcagtggaagtgacgactacttcaaagcggcacgagaaatgcatggcaagtacattggttcgcacccaatcctactgcgccgagcggtaaccgaggttcgcccaacttcggcccccaagcatggaaagcatggaaagaaacaaggcaagggcaagggtcctaagggagacaacgccggtggcgcaggtggaaaagtgaagcaggacggtatcaaaaagccagccaaaacgaagggaggattgaagattctgggttaattatatggatacgccgtttacgtgaagaccgatagtacattttcatggcaagactaaagatgctttcctgttgccaaatgtactattactgaaaaaaattcgaaatatcaaaaccaatttcgttctcgagtaaaagggggctgagtcacgtgaatatacttgtggcctacacttgccatcatcatctctattgcgctggacttgtccttccaagatactaggtatatctcattgagaatctgaacagagggctttcctgatatatttctagcctgctcataatacccttacaatatacggagtgtcttgggtacctaaccacagtatgtggttagtacattggcattgagttccccagcccctctaaaagcacatggctggggaaaaaaaagctctgtttaaaaccaattcacattccagctgaccccatcttctccatatcttctttctcacattcttctgatctataattttccattttcctccaagaaaaaagaggcttgtgtgttgcaagaaccagccggacgaggctgtatacttccgtatacagatcccacccaacgcattgctgcccacctgtacacggcctacgaccttgaactccacgtcttgttttatttttacctatcctcctaccggattgacaagcaacgactgaagctctctacacatctcgccaaataatatacctctctaccacccaagatggtccagcgcaacatcaccatcgcgattatcatcatcatcctcttcctcctcctcgcaatcgctggattcgccatctgggctgtacaaagccacgtctccttcttctccaggaagaaggagaccgatgcagagagtgcggatggctgataaagcagggtagcatgcagcagcaagcactacaacatatacacccttgacgctcggcctcgggcctctcttggtctcgcttttacaggcattaattgcctcttttctttttcggaatacgcacatatacataccatcacgatcacacacacatctacgactacgaccttatctgcgatacgataccctttctgttggcattcaatactaccacccacgatgacgagctgcgttacgagtctttcacgttggaacacgcctttttttgtacaattgttagcgattggaagcaatcagtacatacgttgctttcggtgtattttcttctttttctttttttggttttttagtgtggagttagaggtcttttgctgagtccttttcttttcttggatgtatttgacgaggactgcattgatgcatattcttcgctttgttgaaacccatggtgcatatttccattgacagtttgaaaatatcccaatttgacaaaatttcggaacaacatcgatctatctcacatcttttcgaagccatataagaagggaatgcctaggtagtgtcccaaggatacagatcgtagatgtaaagatatgtccatcgatattttaagaagtatgattccgacttctcgatacttagacaaccatgtacaataaacaaggggaattcaaatgcactgcctcccagggtatacatatctacccaaactaggtaataaaacatcccatcaccgaaaaagctgtaacatacatgaaatcccaagtagatagagcaaccataacgccccagtaataagatatcatctcgctcaaaaaacataactcaaaagctcttgtgcgcgaagagctgtggcaacatgccaaggcagtgtgttgttttgtacactgcatatgcccttggcccgggcaagacagcccaggtcccggtacatacttaaggtatctttcaggacgctgtcgtgagatacgggaatacgtggggaataaatgagattaacggaggtagcaaatacaccgtccgcatcagtagtgcccttgcggcgaaggagatacccgctggatagggcgggtcggaattcggtgaggtgtggagagctgttgagtcggtgggataggatggctagccaggaatcgtcgcagatatcagtgagaacagtttctgaatcggtttcgagtgacatatccgttggcgtgggggcactataggcggcgggaccggcgctggttggcgtggctgcattgcctgattgttcgggggaagcaacgctggcatttggattaggagtcgacacgggggtagacgaagacagtatattcagcatcgccatcgatacgggtggaaccggtggctcaaggatcaagtcaggaacagtgttgacagccagaatggtcaattccaatgacccaggctttgacttgttgtgctggtctgctagactagcccaggctgtgaatgtgttagcgatatgtcctcgatatcaaaaaaaaaaatacgaagcagtaccttcaacctcctcggtttccatgggctcggtagtcgctagctgaactttccatcgtgcttggaatttctccataatgtgtttcgtcgtagcccaaatctcattccttacttcggaaacaggtctggtaccacccgactgacgataccgcagacagtaagacatggttctttgaatagagcctggcaaatcggaccatgccaccgatatccagcgttgatcaagacttttggagtaggcaatgtgaagacttcggccatcttgaagcggcgaggatctttcaggagcaagtcggaaacttatggctctcggaatggcgtcggccaaaagcattggtggcgcacagagcagggggctcatctccgcatcattggagcgacatcgactgtagacttctaaggccaaattcaaataatccacctggggaggtataaccatcgtttcgcttgacatcacgaactctaggggaattatctgcagaacaagctcgttggcaattcgagtctgtcgtcgttcggaaccggctaccaattgttggaaaaggtaccagaaggcggaacaaatgtcagccaatgctgcagcgtgcgtaaatgggttgataatatagacaacatggttatcagcagttgccgtagactgtgagagctctgagccttgggaattgttagtaaagcacataatcatcagagaaaacacataccaagctgctcgcatgttctcttcaatacctgcatcatagattcatagctagatgtttcagatttccatagcttcagcccctcttcgaatgctacagaatcgtctcctctggtatgagttccaagactgcaactttggtagagcagaccaaaccgcctcaagaaaacatccgctgccgttgacgcagctggtgggtgaatacaataagcagaaatgttctttggcccatgagcaggctcaagaccgaatgtctcccaaaaggatacagccgggggaagcgcctctaagtattctttacctcgacgcacacgtatatgaggcgccgataactttgaaatgaagctttttggggggtctttgggcagcgcctgatgttgtggcggttgctgctgtggaagattcgcgacaaattcatcctgaaatgacgtatattttttgaagtccattctcgaggtctcgcccaagagtgctgtgtcgtcgagggcttgcagtgacaaagactcgctctcgagatcaaaaagaccaattttcccatcaagtggatgcttgagggaggactgcgtaatttggtcaaccagaagttgggcaatttcaagttgaccttcatggcgaggaagaacagggagttgttgaggtgggaaagcagagaaataaccggtgagggtccaatcggaaaaattagctagaaaattgccgaggaacgtagagttctcggctgcgtacgcaggatttgcttctgtgccaggaaatgacttctcttgggatgcaactgacattatatcggattctgaaggagctcgtttccgcttcaaagaggggatcgagggcatggctgccggcgttggaacatgctccgacatgatctcgatactatcgtcgctgctgtcactgctcaccgaggctgatcgtagaccattttctgactgaatcagagatagactggtcttgttacgttcttttgagctaggtacgttggcgttgcttcggtcacggcgaggaatgccaatcgtgggtatggcagatgtctgatttaatgtgtccaacgagttaccaccggagaaccagaatttgccagctgctccgtacttccgatcccaatcaccaagtttcttttcgaatgccactgggtggtaatgcccttgcccccggtgacccgtaggctgtcgacgatcgtctgcctcagaccccgggaacaatatcttcttcacttctactgggctcaagggcgggctgattgtttgacctgcgcgatccataggcgaatgagctgattcttcgggggccatgggccgttcagataactgtggtgattcgtggtgtatcggagaggcgtgtacctcatgggtttccaaatgagttgggatttcccgtgactgattgggggagagctctgcatcaaccatggcctcggcctccgattcgctttgaggacggggtgcttcaactgcttcatctgcatcctctacccgagagtcaccctccatgccatcgaaatcagggtcatcgaaaaagctgaagtccgcatcggtgatacctttcgacccaaaatctctttcgttcatttccccaaagagatcttcttcgtcgcttgcatcatatcggccagtgccaattccaacgccactattttgaacgggtgatatattagatcctggcacatttcttcttgaatttcgttgcgttgcatgtggtagcccgaagtcagaatcgtcggcaaaagcctcaggagggtttggattgttcaacccgactgctgcagctccgtctgggggcgttggatagacaagattcatggtttgcaaatcaggatattgcgcaattcgggataaactctctgtggtttccaagggttcggccttgggtggtgatgccatttcttggtcttttggtcgtgagtcttgggtggtaggggtgttttgagcaatatgggaaatatgatctagcttgagagagctcgccattgtagaccattgctctgcaaaatctagaggttcgtcaagaagggaagtttgagcatcggaagagaaatttgatgagctagcccttctgaagcaaaatctcgctggccacagcatgcgtttcagtggcagtgcagattgactatcatcactctgtcgccatgcttccccagcaagcctcgcgaaaaatggctcccaaacctccacttcaacccagggttcttcatcaattgagtcaacatgtaacccaaaattccgcagccactgcacaacatccaatttccactgtattcttttcgcagacagattcccaggggtggggtggcccagagagggaacggttggcgagtcaatattagccgtgacaagtctagcgatagtcccgctcgggcatagccaaagatcaattccaggctgaacgtcggttattttagaaatgtcgtcgcgtggactgcacagtcgagttatgcccgtttgggatacagtctgggcggagacagttattgttccacttatagttaactgaacattgagtgtagtcaagcaagaagtggagaggatgctctcattgttgatatgggggctttcgtatcctgacttttcgatggcagtgaaaagggttcgtgatccgaggggcagagcaccatggcgtctaatcaactggaggctaattgaaccggtgacagcagatacaaaggaggcataaatggccgctgaactgctgtaaccatcttgtcgtcgagaggtaggctggctctgatgtggccgtggctgtgccgcgggttgggtaccgttctgactctgattgtcggacgacagccccttcactaagtccagcgaggagacacttcccaatgcagagactattgtaataaaattaacaaggccccgaataagtctacgagctggccagagacttacctttcaaagttgtggtaccaacgacgatcttatttgactctgtgtcacttcccctcacatacaaaggtttgaggctctcgaactcgggagtgggggaaaacacccaaagccccaggcgccttggacatgaggccaggcagttcaaacccctcaatcgagcctctaaatctttgagacgactcaagtgcttgagaatagtgtagccattggcggggctctcttgtgggttatttgtgataccagcttcttctgtgtatattctccagtagatgttggagaatccatcctgatgtgacgcgtcagcatggacgcgaatgtactgtaaatattacgatactcacaataagatgtatgttggtgtttgcgccgccagggaagtccataatttaacggtcgcggacagccccggaagcttttaaagatagaagaaattccgatggctgactctggaagtcatttccaatcgcaggttgcatggtctgtgggaaggagtgaaagcgcatagcagagagatcggaaagcagcgaatacattagctgattgataccatattgcgcgggacgaagtgatcaacaaagactaaaaaggtctggcaaaacactgtctctcaaattaaatcagcgcaccaaatgaagcagcaaatctttcaaccacaaggcttatcgcatgaagccaacagaaagttgagatgcgtaattccgggggacgttcgccagggacactcgggccaatcaccaggcccatgtatcacgtgattgctatcagtggcttttatcgcagtttttttttttatcttttgcaggtctgctttcgccgacaccgataggttgcaaacaagttgcagatcagctcaacataactggctcggccttccttacactagaatataccagcatgaagctgtccaacccgtccgaggtcccggtatataccatctcgggttccgacagtgctcgcccgcttcccgaatggcttgctagacggcgcaagcgcagcttgaaaaatgaccccgagtatgccaatcgagttgaattactgcaagactttgaatttgaggaagcaagtcattgtatccgagtcagtgaggatggagattgggtcatgagcacaggttcgtactaatccccatcttttcctgagagcgcatacctaacactattatttgcaggaacttacaagccacaaatccacacccactaccttccgcaattatctctctcatgggcgcgtcatactagttcgctcaacaccacgttcatcctactgtcctccgattacaccaagtccctccacctccagtctgatcgatctctcgagttccacactccctcgggctgtcactacactaccagacttccccgatatggacgtgaccttgtctacgaccgccagtcgactgaagtgcttgttcctgcagtcggtgttaatcaagatggcatgggagaggtataccgattgaacttggagttgggacgatacatgcggagttttgaggttgacgtcggaggtgacgattttacatccactggtggcggaactctccaaggtggaatcaacacgggagcggtcaacactggtgctattgcggagcagagccacaatttgttggccttcggaacttcattgggaacagttgagctatgggatcctagagccaagggacgtgcaggtgtgctgtctacacccacacaacttggactacacgatgggcgatcagagatcacagctctagatttcaatcgctccggaatgagcctcggaaccggctcgtctaatggtctaattcacctctacgacttgcgttcacccgttcccttccaggtcaaggaccaaggatacgggttccctattcacactctccaattcctcgagccgtcatctgcaacacaagctgcgacaatcgaaccgaaattgctttcatccgataagcgcatcatcaaactctgggacatcgaagatcaaaaaccttggacttctgttgaaccggctgtggatatcaactctgttgcttggtgcaaggatagcggcatgctcctcacagccaacgaaggccgacagcaacactcattcttcattccgcagcttggccccgcgccaaaatggtgctcattcttggacaacctggttgaagaaatggccgaggatccaaatgaccccagcgcattcaagtctgctcagtctggttctgtctggcccggtttcacgcttgtgcccagtgaagaggtcgccaaatgggacgccaagctcatcaaggcaggcggagatcccattgatttggcagcttacatgcagtcaggaaagatggtaccttactctaagggttatcaagtgtcgaactttgtttataactctattacttcgttgttccccgacacagaaaaccctagagcgaagaaggtggctgagattatgaacaaggagcgggagagccgcatccgcggcaagaagaaggttgctgtcaaggtgaacaggagactggccgagaggatgttgaacgcggaggagaagagggagcgcaagcatgccaaacgtctattggaaggctcgggcgaccaggaaatggtcgatgctgctgcaactggcgaggacaaggtgttgggtggtggccgtttcgcccagctgttcgaggaccaagatttcgctgtcgacgagacttcacgcgaattccagttgctgaaccccagtacggttccccaggccgctgccccatcagcttcgagaaaggagcgtggcttgacggcagtcgagcaagaagccatcgacgaagtgcctggctcaagctccgactccgattccgacaacgaagcggaaaagcccgtgaaggcagcagtctccaaaaagatttcttctgcagactacaagcggacgaagcggcctccgcctcgtatgcaagtatcttcctcgaatcaagccaattccacccgagaccgctcctttggctctcgtgcacagaatatgaagtcgaaacaaaagcctgcacgacgggttggtgtagtcggcgagcaagagatgagcttcaacccggccgggaagccgaagcgcgctgcccccgaagtgcgctacgacaagaccgacacatcgttccgagccaaggaacgccgcagtgcttcgggcaacactttccgcaagatataatatgtcttgccattattggtctttttttatgccatttccttgacaccatacaatcttgtccagccaggttttctcgcctcaggtctacgaatcatgctcctagcttctttgcctcccacttattggcaattaaaggcttacttgctggcgcagctgtccgcttctggctgaactactgccgaacactaggactgagctcattgacaacctttattgcttccatgcaattaggcgttgtgcgacgtgctgctgtgttgatccccgggacgcatttctttgaacctacggcaactttaacaataccctattttatttgcacactgcctcaccgtcatagacggctttggtgtgacgcccgagaagaaaaagctctggcacatatcttcgaacgaccactttgtatctaatgtctcaaaagcgatgccaaaacaatcttgtatattcagctgtctttgtcactttgtttttcgtaataccctgagtaccaacgtgattgtggtagagaacagtatatctctcatggacaactatctcctttgaggaggtgggttcgagtgcatattgaccctcctacaataagtttcataattcacaacttacaatttagatactttccttgtgaatatttagaattggtactttagttacaactgtttgttatggactggaggggcaatacccacataccagcaatacagattgactacgtactttagaaattggaccaatgaacaatgcaatggtaaaagtttccaaccctatatcatgaggtgtttatctcgacactctgtccatgataaaatcgctggaggatgtcgtgatttatgttattttatagatcgttgcctgaggcgacgatgaagtaatcgaatattagcactaagcctaaaagggcattcgtgcaacgtcgaccctgccatctaatcgcgagcccccaagcccattgtttttccataaattcctggtttgggcgtggtgcttgttttctgttctcgtcttttggggttgtgccagtttgcctgctccgcttgagccacgctcgtttctcaacagaagagccgattgacagcaccgtccagcccctctaccaacaattcggggtgcagtagctcctcgcagggcaagccgacttcaacgtgtgccgatctgcttccaatgtcctgaccccatcataggatctgactattgcactataaacagtcaacggcactgtctttcacctgggggatcagcctactgtggtctccgagcagctcacacgtggaggctagagctataggtctatggcggagaacaagcgccaggtttcagtaaaggcctctgcgcagaaacaatctggtaacgcagcaggcccagggatggcgacacccatcgtggccttggaggcagcgctgagcggggcgatcggtgcccggtgagtcttatctgccaacgatggtgtctacaaagtcgcagcgctgacctattccgttctcgcgttcctagagtgcgtatttctacatcgcagccgaatcaatccactttcgaaggtacactgttcacggcatgcccgatcaccaacctcgtggccatcaacacggcccccgcacccaaccctggtgatgccaaacaggcgcagaacggcgactaccacgtgatccccatctcgcgcatccagcacttccagctcctcgctctggctccgccctcgaattccagctcgtcctcgttcaccgacgcacaacccacgattcaggcactcgacacccgtgcgctcaaggcccgcgagtccaaggccatcggtgaagcgcttgaccgtgaggcgcgtcgtggtaagggcgtcactactcaggcccaggacctatttgatgctttcagccgcactatgccggcgcgatggaacggccacagcatcatcgtcgccgatgctgtgacaattgctgctccttaccgcgttgatgattgccgttcgattgcggagggcgatacggctgctcttaatcgagtgcgcaaagtggtaggttatctaatatactcagtcatcaatcgcaaaacaaatcgagttaacactgtggaatatagctcgagatggagcgcaagaagatcgagcttcgcaatgccagcgctactatcggttcgactagcaccttctctcgccaccccagtgtccccaacgaccagcgcaaaggtggctaatgtgctcaatcacagaaataccagagacgcagtcctatgaaattgtagataggtctgacgtcgattcgagcgtcttggtggcgcctgatcagcaaagttaatggaaatacccaagcgaaaaacgacattgcaatgggatagagatgatttgaaagcggatccgacgggacactgcgcgttcttgaccacttgtgtctgggagaagatgccccccccttatcaagaaactatatgccgtggaccagcattgcgcgggctctgcttgccgtcgagttggaccgttgcattgctgccaaccgaattgccttgtgtcttgtttttgggcagtcggtgcgctcaagccaagaatacgagacaatccatagtaacctagtcaattgctacgacaacactttcttaggacaatgatattgcacccttcagccactgaaacttctgtaatgtgtcttatttcgacaactgctagcgacgacgaacttcaaatattggcaaacatgataatgaaatgaaaataaacccgctatgaagattgaaagctagatggttggtcgaaggctcgaaaagacgctcataaaaaatagagaagaagtatgtcatcaattgccgcgagatatttgcaagactttagtctagctctccgcaactggaactctcccaggaacaatctcacagacagtccccacaaacccttctaaacccgacatggacagcgtcccagaagcagagctagaaccaggcgcagacgctaccgtagccccagaatgggacggggcagaggccatggaaacaccaggcataacgagaacctgagagccaagttccacccattcaacagacgacaccagcgcaaaggtaatcttgacgtcttctttcagggcttctgcggaagaagcagctccgacaatggaagcagacgaaatgccagacactactttgctgatatctgttgccgagggacggcggcgaagtacatcacgtgcgccgccctcggtattgcttggtatcgcactgccgtttgatttctcactaggggaatgaggatcgccgtcaaagctgaagaattcaggttctgacggggaacccggttcggaagatatgtcctcgcctggcccagttaacgccatgcaaatgacacggacggtagctcggatattggcgatgtaggcaatggcgttaccgccaagcaagagtggaggtgaatttggagccgagaactcagtggaccggaaggtagcggtaaagcccgtgtgaaaggggagcgctagtaacgaggtaccattcgagtgcgagtgtgggtcgtggaagttcgagagaatcatgcccttgcggatccggccgaaacgcggtagacggccatcgtctgaaaccccgatgggttcgattccgatggttccgacttggtctctaattaggcggcggacaggaagccggaggtctcttacgctgacaacgcggatacgctgccatcttgcttgggaatctttaccggacaaggaagtctgcgggaaggaggccgggaaatcacccggcgggccgggcccactgcgggacagtgacccttcgggtggttggggctcattgcctagatcgtttggaacgtccactaagatggggccaatgaccatttcgtcgccgatggaaatattcccgcgccggactaggccgcagagaaccatgccgcggttctcttggccgcccttctccgagtccagtgaatagactttggagggagggattgcaaacacttcatccacatcgaagatattagtggggctgtgggagggtattggcggccctttagggatgtggagagttctttgggagggtcgtgggggaatgggaagagagcggaggaaggcatggagttttccaatgccagtgccatccacagcactggtaagcatgataggtacggtatatgcccattttccatcagccgccgcgcatactttctgtacttgggcgctgtccaacgtgctgacttgctgaaggtcaagtggtttgtcacctgcaggcgatgcaggtagcattgcgggttggcgcccagctgttttaagcgcagaaagaactcttccaaggctatcccgtagtccactgcgggaagcaacgtccaatttggtgatgacaatcaacacaggaacctccaactttaggcaaagctctagatatgacagacacgtatcaatttccgattgttcagttcctgtctgttcgctgccagatgtctcattgccacagttggctggaatgcataacatcacataatgtggagcccagctgataagccctcgcagggtagatttcaaatatcgaatagagcccggtagatcggacacaaaagccaaacgacctcccttcgaggcggcatgaatatcatcccaacccgcaacattaccggaagcatagttaatcacggttggtggcatctcacccgtgtacccaatcagttcttgggcgaccgaactggtgatgcccgatgatatttcatgtcgatgcttgagcaggcttaatctgcttttgcctcttccgttgtcaagcgcagacgaagtcaacgtacccagtaaggaagtctttcctgcggtgcttggacctgcgagagaaattcgaatctgctctgtatgggagtaatcctcattcatgactgactttctgccagattctgggtgtgcggcagatttcgtatcgttcttggacttggttggagagatattgtagaagtccaggtcgggactcaccagagcctcggcgacccaaagactttcagtgttgttcttggtttggttcccagtttcagatggcaagtcttcaacccattcacactccccaaccacaactcggcgaaggatctcaactttacacccaatactagcagccatagcccgtagattggtcacactctcgtccaactcatcctgcgtgaggcctacgaaagtaccatcatcgccgacaccgatctcatacaaagcaccttggctttcttcaagaccgggaagcaagcgggccggtttagagggcacacccaattccagggctgcctcgggaagaacaggcaccacaaggttagaggtagtggatgagtgaaaaggtgacgattgttgcaaacgccataatagctgggtagtcaacccttgtagtcgttgatggcggctctggctagacttggcttgcgtgtgtcttggggttggttccaagctcggagaggatggagtagacgtacttggcatgacgcggtaattgtgatggtacgaacccgctattacatgcccagtcgacattgagagatacgggcgcctggctcgaagaagaaggtgcaatttgtactcagtgggaccctcttggggttcgggttccaatttggatattccatagttggataacaagtcagcgtcgacgcctagtggactggtgctagaacgcgtgcggacagctaaaccccgactggcagatacattgatttggggagtcgatgatcccgaagttgaccacggggacgacacccgaggtgggtcaggatcataggtgaatatggatgccatagacacggttacgattcagactggtaacaaagatattggtaataagcaaagatatggagatagataaagcaattctaaaaagactcgagaaacataaggcattcttgcagcagaattgaatgatctgtgatgcaaaagtgctgtaactgactcacaaatggcacgggccgaagcatcacgtggcccatgtttgtcccgtatttacccagcgccaagaaattgtatgagaagttctatcaagacatcaagccttttctctcagagaattttttggcctccccaaatatacatgcataataagcaaatccagtcccgctatagccaagcgccttcgctttaacgccgaaatcaaaagtgtgcatatgctctactcagcagatgaatctctgcctgagcttttacacttgccctgcccaacatgggtattgcgtgctgtcgtacgtgtaaataccgcaccgcatattgggcattcagccttagccaccactcctgacttttctcgctggtggcggagaagattgctgaatgttgagaactcacggccattgcagccatggtcccagcattgtggtcgggggcgcaagctggatactcctgctggacggtcagaatcagtagcggcggctgattctggtgaagagtacattggttcggggaccatcgattgtggctgagagctgatggaggtagggtgcgatctagtgtggtttccggtcagcatactctatgattcgggttcatcgtctcaactcacggcatgtccggtgtagcggggaagtagtaggcatgttggtttatcatataagcggaaggactacccctgcgttagctgccagatcattggatcttttatacttcgagcggttcatccgacatacgatgtcatgagaggctgttcggactgaggagtgacggaagcagattgagggtggaagggatgggggagaggtgaactaaaactggaaatgtcagtcttttcagaggccaggtaatcaatcggcttaccttcgaggttcactgtgacgggaaggtgcgagataagacgccggtaattggtgttcttgctgttggtacccatgcagaggcccatttgggtgattgggatagcccatcggatagcccgatgcagggtatgacggatgtgaagatagaaatggcgggctcgtctgttctggttgcgaaggttgataaggtcggtttgtccacgcatattctagaagtgtcagtagatcatcttttaaacaacgtctgggtgaacttcgtacggcgagtattttgctgcactgggccagcaaaataagagtctggtactactgacatggggtatgatggaatgccaaggctgttgagggatgccctagtcagcactgaatctggccctgggggccgtttttctcatggattagctcgacatactgtgaatcttctgtgccaatttcttctttagtcggagatttatcctcgatatagccctgcgctgtggactctgtaggtggatagttcgaatctagagtgtgaagcggactcgtgctggtattcagcgttgttgaatgatgcgcgggcagtgacagtgcaaatccttgtgttgactgcgagccacccggtgcataaatcgagttctgaatatgctgaatgggccagtgagactctggtccgggaacgctgtgtgaaaagtcgggagattccactgactggactagtggagacaaaagtccaacgttcgattgcgaagctgtgaatggtagatttgattgattcctgcgggaagagaatggatgctgtgagccagatccttcgggaaacattaggaactatataggtcgcagaccagtgagattgcaagtactgcggtagggggtgggaggggccaaggttgagtataaggggaaaggtgggactcgtaagaggaagtcgacgtacaggtttgaagttccgatccgattattccctggtggtaaatcaaaagcggttttttctgtgaggacttcaattgggggcacggaacgggcgcgatgaagtatttaaaagcgcatatccagcaacgggcgtttactagtgacccccgcaatcgtgttatgatctgaaaggtcccggttgggtagcgttgctggcccacacgtttagaaactaaacaccgacttctagatttcttgcgcgccactgatgcgcctcgatcagggccgggtctactaaaacataccctgacgtcccactacccgcttgttcaccgtctcaattgcatatatcagggccggtcattggctgtctgatccgtcggaagctcaatgagaaataaaataatgagaaaaaaaaaaagaaataaggaaaaaaagaaatcccaggatcttcaaatgaggtgggccgatgggaactatcacgagcagagtcggacttttaacccccacaaatcacgggtaaaacagaggatatgcgggaaaaggactcgggacagattgcaactggggccatcgtctggacagtcatgatcctagacaggggagatgactatcctggcctaggcattggattctagcccccattgtagcgaatgggggcggattgggggccatgacgttctcgatagtctagcgcgtgcctggatactccgagatcccaccttgccatggccatttcgaaaagaaaaggaattatgccaaatacgaaaagcgaaacgcaaaaagcgaaaacgcgaataacctgaagtcgccagttccaccccggcccgaggcttgtccccctatcagtcttggcccccacaaacgcaccgttgggaaaaataaaagaaaagactttacattgtttattaatgaggcctatctgggcgtatcacagggtggacggagactaatgcagtacggagtattctcttccaaaggggacaccctaaaaggtaccgtccccatctagcaagtcgttaaataccctaaacaaatccgatttcagccccagatagtcccattccagtaaagatcatatgtacagggcccgctctcggttccttgttagctccggaatacttccaaggtccgctgcactggtattataggtgttagatcgacacatatccggaacgttgggggtcctggctattataggcagccgtgtatcaaaatggaaaagccgtaagtaatggtggagcttgtcacagaaaacacggaggctactggtaatttgagggtcatgatatggtcttcgaggatggactctgattgagtccttccaaagctattcttacttcaaactggcatgcttgtcaaaaatccaatcgcccctaggatcaggcacggtcatgatcggctcactccacaggggatccgcacttgtatccgttggcttcaggacatgtgcgatttctactaatgcacggttgatcatttagtgcccgattacagagtatgaagtacaacatactaggaattaaggatgttctgaccgttttttaaaaagcgtcgggatctacaatgtatggcgatctttgggttcttaggcttgggatcaacactattaattgacttggccaggaacagcttatccagcccttcaatgcaaccttggaaccctggttctcattgatttggtttcttttgatgcatcctttgtgttttacattggatgggctcacctactttgaccaggttgtaatattcagtacggagtacgccttgctcagattcctgtagtatgtaggttataaatgccgcattgggctggtgctatcaaatggaacaatcggctattcctcccccattcaactggcataaatcgcaagtctgtcaaaggccaagagagaacagatttgaaatcaatcgctcgtagccattcattttgtgggttcaggatttgtctaaaaccaatatgcttcgctgtacatatcactctgcaggatgcaggtcaaaaaccaaggcatatcaggaaaaatacggaccgcaatcccattgatcccaccttgacacaccgctcacctgcatatcaacttcaaatgcacgaaagccgttagagctcatgggacctttccaggtaggagacaagttggagcttctggaaggtcacattgcctcctgggaaggatcaaagaaccaattctgcttgaatagcctagaaatcgaattcctcggtggaagattggtcttggctgagcatgtctcagacgatcggaaccagtatggtgaggataaaggctgtggatataatgcggtatctttatttcattatttcaataaacatacatagatggatgtccatcccagttgcttatcgtagcgataatgaaattcgcaacccgtggacctcgagatgggaaatccaaatcacgtgatgacctcacctcagatcttctctgggctcttggtccaacagcatcatcgtaaccaacgcgtttttatccccacgatctctagctatctgctagtgtctcacaacacatcaaactgagaccatagttagcttgcagcttcctgattcaccatgaagctcgtccggtatgtgattacctttattgtgcgcggcaagcagctcgacgcaccaagcaaccctcaaacccactcctgctgacatttaatgatccttctagctttttgatgaaatgtgccaatgagacggtgaccgttgagctaaagaatggtgagaaaccccggcgcaatccccgcaatccccaacctaaagtccccacgaatatgccaatatgcgaaatacgcgaacgaactgtgttgtctaacttaactcccgtatctaggcacaatccttcacggcaccattgtgtctgtctctcctcagatgaacaccactctccgggctgtcaagatgacccccaagggccgcgaccccgtttctctcgacaccatcaacatccgcggttccacaatccgctattacatcctccccgacagtcttcccctcgataccctcctcgttgacgacgcgcccaagccgaagaacaaggcgcgcaaggagacagaccgtggtcgcggtggtggccgtggtggaccacgaggccgtggaggacgcggaggtcccccccgcggtcgtggtcgcggacgtggattctagattttctgttttctatgagaaccatccggcgtttgtttctgtcttcgcaatcggtttgattttgcatcatatgggctacaatgtgttgttccttttttctactacccaggccaggggtcccgatatggatggtgggtgacatactgaaaaaattaagcaattttaccggggaatgttccccactctgaatttgcgcttctcaataccgtgtacctcaataccatgtgctcaggtgaacattagctatcaaaagtactgtggaatcacccgagagaaggatacatacgatctgtgactagatccaccttcccttcgtctcttatctctatgcacggttccgggccatgtggtgtgaaggcgctaagggaggctttggccaacatcaggccacagcaatatcgaaacagatatctaaaacgtcatgcgagtatgtgaacctaatatcgtaggcatgtccgactctcgaataggtctaggtttttctctaggtgtaattcttagtgtcttctagcgtgttccctttccgttaaactcaaagactcggacacgacggtcccataacgatatataacgcatccgagattggcaatgccgagaaggttatttaaagcaccgtggactattttattctttttctttttaaagttctcgcgttgagcacccacatttagtggtctcggaaaacccgctagagccaaaatcagcaagacggcgtcttcaatagcacattctgtcccaattacctagttactacctaattgtggcctctcggtgtaatactacctctactttgacgttttgatacgaggcttgctgaagaggcttgctgaagttacgggagttataccctataaagaacgaaggtttaaggcgtgaaaatatctcagtggaaccagaccaggggaataagctgcgagtgcgcggtttttttcaaaaaataacatgagacatgagtgtccgctcaatagccttcagccaatgctgcaaatttaatccgattaaggctggcaatatcttcccgtgcctcctgagctctccaaggtttggaacaaccgggtggctctgagaccgttgccaagatatagaatgcggtatttcaaaggataccggaacaagctcccgagccttttggatcaataaggtcaataaggatatcaccgtagtccctttcaagctagaggggccagactctgttgatccaacaggattgattgccacggtcgacttctcaccagctccgccaagcgtcttatacgcggtatgtggctgataaggaccttctatttcaggggttgggttcccgtgtgcggaccatcccgtgtacatcgctcaatgatcaatcaaagccatttcggttttgatttccgaaagccgacgtgaaaaggttcgggatttggaatctggtgaaaactggatcgacgaactataaagtgctgctaacgtatgttccagtgtgttctttcgtcttttctttgtatactccgtacgtatatacgactacgtagcattgcttggaattcggatattactttcctattttgtgattggaggagatcatttccaagcgcgtcagacgacgtgatatcccaaagatcatctatgcccaagccttcatttcccagttattccatacaaattcgggaaatgtttccaagacacatctttgatcttcgctagtatacatgtaacaccgttctgacccccttagcacgacagcgccgatctcaatgagtagccaaatcacccctgtacggagtacgttagagtgggtatcatagtgggcgtccttacggagtgctgttcgacgtccggctcggtcccggtttgttttacaaatgtgggggccggaaaaggggcattcagatcgtcgatctactctcgatctgtcatcgatctgaccacgcgctgttagaaaactcccatacgtgaagcggaaattcgcgtttcacaataagtgatggtgcaatgttgaggcctgagcaggcatggtgctatgggctatgggatcagacgatcgagcgatgtgacagccgcccacgtgggcacgtggagactcgttgaggctgtggagactaaatcactcattgattgtcagagttcgcgagtcgttccaaggtttattctcgaagcaaggcagtgggggctcaattggacaggcaaccaattacattgtcgatgttgcataagctaaattgcaactaatgggacgatagccatagccctaagtacaacctaaacgagtaggaccggatcagaaaaaagggtcgacggcccacatctatgatttgttcttcgtatctacagagtatgttgctggagatttggagaatctgttcagaataagcgaagatcagatgattgtatctaaagcatcggtctttgtcttgtagaaccgacacagtggagttatatataagctaacaaagtatataccacgacacctcatgtctccttatttgacatcaacggatatattatgttgagaaaaatagtataataaagttatctgcataagccttcctatgaaagccgatatatgcaatagcatgcacaacggcagaccagatctagtactctagccaacgtaccatttctttcattaatggttatgtacttggattcttgattctcggcccggtcatcattaagtacatacattctaaaacgacactccaaatgtccaaatgtctaaacgttaaaatggtacaatagaatcatgcaatgtatcatccgctaatcttgcactttgcccttccagctcagctaattctttcaatcgtggatgtaccacttgaacgccgtctttctcaaagaccggattggagtctaattcatggatcgcatacggcggagtaagcttcttggtttcagcaagttcggatcgttcctcttcgccatctttccatgggcgttttcatccacggatccaaaaaaccaatccccagaatagccaagataacacctaatgcaacaccaacgcccgtgcctgctttagcacctgttgaaagctccggaggtttctcttctgactcttgagtcactgccatcatcgttgtggttgttataactgctgaagtcgtggttgaaacaaaggacgtaattggggccgaagtaaggtcagtagacctccaacggagctcaacaccatatccgtaccaactatcgactcccgatgtgataggaatggtgagtagtgtagtaccggttacgtttatatgtttaaacgtctcgttcatatcgaccgtggcaccgaattcgcaaacctcgaaagtggcgaattggtccatacaacaggcgcgtgtagtgaatttccagctacttggtctatagtagcgttatattagtatgtgtgtatttcattttcccaccgtcctcatctctagtaatgccaattgcttactgataaacagggcagcatgttcctataatttcggtggcgctggtataatttacggccattgcccagccgctaggacaagcgatcctaggtgaatagtatgacgatggggaccagtttgatgggagacatttggcatctgcaggacctaagtttgcccacaatgaccttgtacctatgggtgaggcgtttaatcagaaatccgtgagacattcaatagccggggtaaaggtcgtcgtcagtggaagatgcgaccgcgtcgtggttatcattgtgggaggagcagtcaaacaccaaagcttcggacgaggaagaagttggaagaggaataggataggcaaatcggggttgatgaaatgacaggttgtaaaagcaactagactactgtgtctacccgtgtccaagatgatatgcggtccatccgatacttacaagggggaaaatatatgacccggtgtagaggtatggggaatgaattaagtaaggtataagcaatgaaatggtcataaggaaaagccagagggtcatatttattattcctgctgggaagtcgttgaaacctgtcttcagaaaacaatgtagccagctagaacgagagccttgtggacgaaacgcgtttattgagagcaagccaacacccgaaaacatctagataggtagcatagtcaaagtaatatctaactagctttcgccatccagtctatgcgtagttgacagggcgtcaacgtatgcagtcaaaaccgactcactagaggtaccataaacatgccgaaaaattgctggaagatagagtctattggaacgatgttgtattagtcggtataatagtcattatactgagcatatcaaggcagacaactcaccaatacatcatccagagggaatgagttaagctggattgtctttaaaactcgaattacaatcctccgtcattgtaagataagtagccctggaggcctgtaacaagctgatcaaggtatttttctaagtgattcgtttcatctaattgtctctgctcgttcggcggtagaaataccattcaagaggtgatccccgacggttgcacgcagaaccaagtcagggatcttgtgagatttgagacaatcgaataatacaagggcgatgtttgctgtcattatatctttggcggtgaccttcctaccaatttacccagtagggcggtcatccacggtgtatgggaccttccttattgggacatctgtcgttcgttttttctttcattcctcctttttccttccctttctctcttcctcctctttttttttcgcttcgtcccttcaacctgttgtgggcttccattttcatcaaccttgcggaaatccattctctcatcatgtcaagcttcgataagttcctcaatcccgcattctgtgcgaataacacaagctcgccatgtcccaacaagacctcccaggctaatagtgcttgcggccgctgctacttggttgtggtaagtctccaacactttgatcttttcaaagctctgcaccatattctaatcaaaatcaaaacagtactgcggcaaagaatgccagaaagaacattggcccacacacaaagagaattgtaaggacgctctggggtatgagacatggaagccagactggcacagaggagatcgaaagccagagtttttgaagaatcgagacccatctgaacggaatttgaatgacggcaaaatatcgtggtggggaggcatgccagcattggacttgttgaaactggatagaaatgaaggccaggatgcgccccccaagatgagtgttcttctcacaggtaagagactgtctgaattccaacaactgctcttttgactaacacaattcctgatagcatcacacgatattcggaacgtagtcgagacaatcgctcgtctgccagatacctattcggggcaatgtgagatcgtgatgaatggcatccacgctgggattttctcgcagaatgttcttcttgttctgacagctttccattttccaccagagcacgctgccattatcatgattcacttatggtattcagctttgatacccgcgtctattatcaccgcagtccgaaaaaagctcctgccaaagattgacaaagtctgctctgaagctgcacaaaaacggtctcaaccgtttttcaagtgcgtctggaggaagaacaaagcatccttgcatgtggaacttgcgagagatgagtgggaaggtcttaaaggataccttcaggttcctgctgacttttctgctaccgaagccgcctgcaatcgacgagacgtcatgtttgctgacaatagaaaggatgaattccaaaggactctatacgcacagcctagatactggcgtgtctccactatgaagttccgcgatgatggaatcatgctgcctttcgggtgctcacgcaaggcatttgacactcctaacccgttagtctgcccgacctttcattgtacctgtcatgtcactaatacaattaggatgtttttccataccagtcgtaattgacctatgccagactctgcagatccgcgcaccagctgggacctcctggatgtatgcactggagcgtacactgcgaattatcctgcgaagaatgatctgtacggtatgctattcatctacctccgtgagactctcttgggtttctgtcgccaaatttcgaaacgagatgtaaaccttcgacttctttctatcgattcactgagtctaccgacatatttcaaccagctaggcgaacatccaagatttgacagaattgatgtaactcctcccctaccacccccacctccacctccgttttgaattctattatattcttgagacaatgctaatttgatatagacgtatgtggctgcagaaaccggcgtgcttgggatccacaccgtcctcagggtatttaccccaatgctgaagccgaagattcaaaatccaaaggccatgcttcttaccctctttatccgcgacattgaggatatgtggaccaaggactccctcgacaaggacgtcgctcgtgctatgaaacacctccctcaacctgagtcagcggctagcaatgatgcagaccaggtgagaattaacagatcaagctctttcttctgcaacgtcagtaaaatgttcgatctttacaaaaaaacctttgaatttgacaaactcaccccaacatttggattgaagatgaggggcagcaccacaatcgtggcccactggccaatgcgacctggaaaacacgccgccacgacggtgtttgagattcttgagggatccggcgccactggctgtgaacgctacgtcgaatgggaatgggaatgattatttgcacaattgcaaaccaccaagcagtcaactgctgggtgtgtgtatgtatctccttattcttactgctcatgaatccacaaatggtatcatcgttattcaattatccattaatcatgagctatctcctctccatatcctcacaatgaccaatttctcccacccagcctgcatcccactcgaccccgccgtctcagcgtgccaactgccccagccacggacgcgttccataacctcatcaggccgattctgcttacagagtaagacataagccacacctcgcacagacagcacaccagggatagcatcaagcagtctgtccgtagtttccataccatccgctccgcccgcatacgttaacgacaaaaaatacgagtcattatcgaacttggcagagcgagacatggcctctgaaacagcagggtcattctctgccgcagaaggcagacgcggtagatcctcagtcggaacatagggtggattgaagaggaggacatcaacgctgccagcgcgaagaggtgcacaaagatcggcagccaatgaagcgatgtaaactgattgagacggctgttgctctgcctgaatagctgtcgttgcggtcttctgcgttgcgatgcaagcattgcgattcacatcagtgcctagtgtgagaatatcgcgccggccgaagatctcttgagactgtgcggccgcgaatgccagcacaacgccagagcctgtgcctacttcgacaactagtggtgatgcctctttctttgggaatctttcagagagccattttgattcggatgcggatgacaatgtgtctaggaagaggtatgagtcctcggatggctcgtagatggtgtcaaaggacacatgtgaagtatctggtgtgggaagcatggtgcgtatgtttaataaagcccagtccaggtttatcgactcctctttggagatagtggggctatctcgaaattatatgcagaactcgcgatcttggcctgaggcaatcacaaatttcaggcaaagaatccacttaagtggaagatccaatgtgaagcaatacaataaaaagtatcagcaaatggcagagaaggaaatccaagactaaatcccgagacatcccgacgcgttgattcgttgattcgcctcgccgcctttgcctccaaaatccccggaaattatgtcattccttcaatcctcgatctaaaccctccaatctcctaaatcacctaccaaatattcaagatgcgcattgctcagcgtttattcatggccatgccggcctcgatcggctcgaagtccagcctcagcgaggcccttgccctcctcccgccgctacagctttaccggcgcattctccgcgtccatcgcaaactcgatcccgagatgcgcgtcttgggcgattcttatgtgaagaatgagttccgtgcgcatcggagtgtggagaacccattgcacattgtatgtttattcttgcccgagtttggcgtggttataccgaattgaagggaaggggaggcatagcggaagaggaagggcttgttgaggcagtcactgacattggcaatgatagatcgggttcttgaccgagtggcagctatatgcgcaaaagttggaaggtgattcatgggcaggagataagctggacaaggctaagttggataagatgagtggtatgttcttgactgttgttgaactctgtctaggtcggtcatgctaaacgttggttctcattgtagatcagcaacttggacagttactcgagcttatgcaggctctgaggaacgagggagagggagagggagagggtcaatgagttctctattgatcacatagcacccgaggctgacactaccaccccgagagttggtggctgaacttcaaaaattggctctgagctgcttcatagatctaaacagatcgagtgcagagtgcttgatctcggagcagccaggcgtgcatgatatggttatgctgggagatgcaggcatcttccatcccaccatcagcccatatgtatatactacgtgtaggaatagaagatacgaggtttgacttgatttgaagttttgacaattcaggtctgcacccggtcatatatacattatgtgctattgtttctatatgactatgtcgaggaatcctccaaggttatatagatgcggaacaaccccgagcacacgggatattgacaaggcgaccactatgcacaaaaattaattttagctttaaattcacctatcatctcttatcacttagcagggaaactgtcaatgaaaatcaatctagatactccaacatcagtggagaacgcgccctgttaatgacaagctgactcatgcaaagtcggctgccgatgccgatatcgagatggagaagagggtatatcaatcggaaaacccccttaaccacttgaaaattgcccaattgatcctctgtcacacctcgcccttatctccaagcccgtcccaacacacagatcccaaaaagccccccattcacccaaaatgccctccattctggaagacccctcgacccgcaaccccccaccaaaagcacacctagatgcagcgccgaccctaacagcgtggaaaactaccctccccaagtcctccgcgccgatgacggtctaccccatcacagggggaccgcaaaccgttccaaaggacctgatcaaattcctgcacgaggagttcactgcggaaatcctccgcggcgggacgtacccgatggagcaaccgatggcgctggatgagttcgccaactattggttcggaacgtttgtggccttggcgatcttggacgatgaaggggagggcttaagggaggggagggactgggagagtgtttgtatgggaactttctatatcaaacccaactatcctggtatgtgtcatgttcggattcgaaccaacctcatagtaataaaagcactaactctaataggtcgctgctcccacatctgcaatggaggctttctcaccgctactgctgctcgccgaagaggcgtcggacaggctatgggcgaggcatacctggaatttgctccaagactggtacgacgtgcccccccggctttgcatttgatcacacgcatgacatgcatgactaactcttttggtaggggtacacatactcagtcttcaacctggtcttcgcaaataaccccggctctattcgtatctgggagaagctagggttcagcgttatcggacgggttcccaaggctgcgcggttggcgaacagcgaagaattggtggatgcattgattttcgggcgtgagctgggaaattaaaatggcaggtttcagttttagtttgaagcgtccgttaatgtttgcataaagaatcgccgtttcaagtatataggatcgtgttgttacgaatgatgaaaatactgcgatgaattatacatgacaataaacttgcctagaaagcaagtaatgtgatttcccgagcgaaaagcaaaactagataaaactacaaggaataatattcacagggaagagaagctaagtggtaatcaatgagactcaaaagataaaaccgcgaaatagatgacctcaacgctcagaccataccatgcaaacaatagggatatcacgcaaaacctgacttgtcaagatgatagctccgcttcacactgactgaacaccgatttgggaatagagatcgaaccgagaaggggtgtaatgcacaagtaaaaaaaacatagatagaacgtagatagaacaaggtcgtagaagtgtagatagaagtcggagggcagagaaagaagaacagaagcgatgagggaggcaaccaagttgccactagcgccaccgtggacgtgtatccaccggtttgggggcctgctctttctccgccgttcgcttgggaagcgggagtagactggttcgcctgttcctagaatggcccagcgatgtacctggtcgtgaggatttgcttgggctctccatcccacctggagctcccgacacacttcgactgaaagctgtgggagggcccgcgaagctctggcgactgcgaggtgtgtttgacatccctgattgtcgatagagccgagcgtacggctgtagatcgaaactcgaggactgctccggtgtgggagagcacccgctccttggactccgagaaccaaagcggctcgagacgcgactgactgatcgaagattgccggaaatgggagatgcggaagtctctcggaaagagctggagaatggaattgatgatgatggccgaggtgtgcgggcgagcggggcggatgacttccgcaatgtcgaattgtaaccagtattgctgtcgtccacctttgtactggcgttccagcgtgggcgattgggaattgtagatggcggcgctggtgtacgagaacgagcagccggggtcggtgtgaagtaacttgaggatctataggatgaagttggagacgtaaggcccgtcggttgggggattccggactgtcgaccggtgtaagtcgtggcttgcggcaagctggagtaacgacggtttgggggcatagtcgaacgggctgtggtacttccgaccgaacttccgcgacggcttgagccacccatgggcgttgaggcgcacttgtacccgttgctggtcatgacgactgacgacgccggcgagcttcctggggtgtcaatggcactgcctgcggctggactgtccatagtgaagatgctggagatcgagtctcgtagctggtggcccctggtaatgtgtacatcttcgagagatgtatccattaccttagcgctagccttgagagcatccgttcgggatgtcatgtcggatagtaggcgcaggatctcaccattgacagtcaatcggtcgttgacgcccttttgaatgatggaaaccacacgctcaatagcaggaacataatgcattttcttcgcctcatagttttcaatgagcttgctcaacgttgacgggttgtgcacctgcatgccggtttccagcccttcttgtagcttgccaatactgcgttcaaccgattgaaacatcttttgtgcctgggccccagcattgcggaaaaccagaatccacttgtcttcagccaactccttcaggagagcttcagcatcggtctcaagaactttatagctcttctccaagcgatttcgccggtcctcaatctcttcacacgcactcgggaaaattgtctcagcgcgtccctggaacatcgatagtcgcatgggcaagaactccaacgatgccttcaatggttgcatgcgtgcaaaaatagccatgaggttagagtggctcgtgtcgtcctgcggtgttttaataacgggagtgtcagacgtcgaggtcaagagaggtccaatactcagacgattctgcgaatgtctgcggcccttcatcggggactcttccacaatagtctccagctcattgatatcaaggccaccactggtatcggtcgtatccatcaatgcctgatgtcgcttctcttccatctcaaatatcagggcactcaagttgtcaacttccacgcccacatcgcccagaacgttcgaccaaagctcttcccactccattgccagttcaacctgttcttttacgcctttcagctttttcttaatctgagtccagttttgcagaatgctctccatctggctcacgatagtgttcaagttatccacatccacattggcaatgtcatctcgaagttggacattctcaatagccctaacatacacatcgacgagggactcgaagcgcgtgattgctttatcgacttcatctagcccctcccggccaccagccgcagcccattccacgtcatcttcagaatccaagccgctcaggacatctgaggccttcttgatccaaatctgaatttgctctgcagcgccgttcaaggcccggactgcagacaaagccgtggaaatgttttcgatgcttgcctcgagcgaagctggctgtgggagggggatggaggttagctgcgagagctggttgctgaaagaggcacgggagaaagaatatattgagtcggcgcgctgcaaacccattgggttaaaatatgattgcgagttggacgaagagcgcgagtgggtggcgccgatgggaggcgagtctttgggagggggtttcggagcggactgctcttcagcggaccgttcctctcttcgtgcggtatcatcaacatatttttcgaaatcggtccggtcatcttgaacgtcattgggacgtcgcgagttcggcattggggctgcgcgcggctgcgcgagaaccggctctgcgacagacatgggcgtgggtgggctgatgtgttccccgggctgagcagtcgccgaaactatggccggagtgggcagtttaggaccgtccacaactgcttcggatgactccgggttatctcttcgcgcgtctgcaatctcttgtaggatatcttggtggggaagctggaggtggttcgatgcgctccggttgaactcctcgttttctccaggtgatgtgttggcacgattccacgcctggcccttcctccttaccttgatcgacaggtcttggtggagattgtcaagctccttcaggtgctcttcgggtattcgaccgactgcattggcattccggttctgcgccgcggacttattactgctgtccagcagcttgacccgagccgcgagggcgggagaaagtcggcggaggatggatggtcggccggcgctagtcggctcagcagggacaggttcttcttcgttgttgctgcttcctaagctccacagggatgatttggacttcaggcgtcggagggtggaggtaccggagtcatttggagagacggagagcgcgggggtgagcgatgggggcgacgtaggtattgtagaggtgttggaaggatttgtcgcgaggtcggtcgcgaaaggtggactgtcggctgtggcatgcatggagacaggccctgggggaattgaaagagcaaaaagaccaaaggatgtggttcagacagggatacaaggaatgtttggtcttgctcggtgctcggtaacagggagtccctttttaacgggttaaggctggctttttggctgttcaaagagtcggagagaaatgctgctacatggcaacaattaatagaggttctaaatgtaaagtctcatgaagagtgagatactatcgggcagcaaccattgaaacgaatgaaaagagggataaggtggccagtatgcgctgtagaatggggtacctccagccccgtactactgactatggggcttgatgtacctcctcggtatgtaattcaaggggatcaacgaaatgagatcatttcacttttgttttattttcttcttgtgttctttgttttctttctttcaacggtttcagttgagtggtattcactatttctattaacacaccgggctgtatatatatcaatctcacctccttgccctatatacatatagtacaacctctctgtgcacgaggtttgtcgatcaaaaatgcattaaagaaagtttatatctgagtcattttcacaacttaacccttttccagccttttccaaccgtttatgccttctgcccaagaagagttaggcagggagagaagatatctataaaaagacattgataaaggcatctcaaaagactaccatcgagccaccttgacagagaccacaacgcggccgactaatcttgtaagaaattaatgccaaaggaagctagtcccttctttgtacattccgatcagcaatgagatatcccaatgcggactaagcactataacaagacagggataaatgttcaaagcttcaatctgatgatgcatgtacgcgtcaatggaatgcaacgtgagatactatacaattaatatacaataaatagaattagaaaggagaccaacgatcaagaaaaatcaaaatagcagaggcggaagagtcggcgacaattcaggggtatcgtatcaagtgcacataaagatatcaaagagaaaaggaaacaatcgagatgcaaacacgaatttccaacacttccaacgagccctcaaatcaacccagcactcgggggtcgaccagggttagcctcctgccaatcgcgcactagctcttcgcggacggttttacaccaagccaacagtgcagtatcgaactgctcccaagccgtagtgccactattctgtacaacacccataacatcaacatccagccggagctcccaccggagttctgcagcttttacccagaactggagattctcagtctgccggtacggcttttcaatgtctaggtggtaggccgtaatgtcgccaaatttgcgtttcgacttcttgatcgcaaggttgtgtaactgaaccagggcacggccgtcccggaacctatcaagaaacgcagtgggaagggagtcggcgggagtctcctcaaccggtgtccaggtcggtaaggagtcaccgccaggcaagaggctgcgcaggaaggactcctcgcgtgagcgctcccggcccgtccaatcgccagcagcccaatcccaattctgccgctcttgagcttcaaggtcttccagcttcttttcctggattagcatgacgcgcacagccgcgatccacccctgaatcttctcacgttcctcctcgcgcagaccgctggcaaaatgccgggcagaaaaccgcttcaaaacttccaggacgtccaaaagttccttgcggatgtcccgttcgctctttattgatgccaagcgctctgggtactcgtgggtggtatagtagattttggctgcgcggatggcatttgtaacatcgtcgaggatgcacataccctgcaactcctctttattcatcgggggcgcggcctgcccggattgatcgtcctcgtttgggacatcgtccggagaaagactcgatctgaggattgggcggggaggaggctccatgccattttggattgcctcgatattagactctgccttatccagcgcgagcgtaagctgccggcgcaagaaaagcagacctggaggaggagggatgtggtgcgttttgatgctgtacgtgctgactgtaggcggcagcatcacctcggcgtcctcgtcctcaaattcaaattccccctccgtcaggtctgccatacctgacgggctcgcgaccagatcatcatccatgtgtcgttgattcggggtgatcaggactcgtggcacattatttctgttcttcttgttcttttcccactcgcgactccttccgctcttcccgtccagtaagcccgtcctggcaaaatagtattgtaagtgggcgatactgccgaggctcatgacgctgtcgcggtggcgtgccgattccgagaacttggcacccaatgcacgggtatatccatggcgccgggatgatgttgatacagacgatctggcatctgcggaggtagcggaggaggtcgagcgggaggactcggaggaaaacgtgcggtctggggaggaatatgaggagatagctggcgttgccggaatagatggtgacggcgaggagtcgcgtatagacgctgccggtttagagtccatggaccgtcggggcgcatccatcttgattgaatttgaattgtcaccgggtcagaaggaatggatctgtcgcgtggagaccaatcactagaacgttcacagtgacggggtattctgcgggggtgacgatgtgacgttaacaatgagggctggacgatccctagacgagcaacggcttttatataaatctattaatgaaaggaccaaggtttaatgagacctgtaggatcgacggacgaaaaactgcttttgggccaaaagggggggcttcgactaaccggggctaaaaggggaagcgggtcaactgccatggagttgaaagagatgagtgttcctattttccaccgaaatgaaccaatgaggcccgtgacacccctttttgattatcgatcggaagttatgaagctatacggagcacggagtatagtaacatgatgctgtatacttccagggcctcgaacatccacgtgttcctgaattgcctggtaaggtttagcttgtgccccgcatcccatggttcgatgactggaaccttccaaggttcgaacattaaaacttccacgtggcgttacatgtctacattgtatactccgtacaacttcaagcccaatggaaaagagatgtatatgccattctatgataaataaccctttctaatcctctatatttgaaacgcctgtcaaaatgtgcgtttggaatgccttaatgcttcacagctctcggttcaacaaagatctccttgcggtcccaagcagctggcttgaggtcatgaatgtccttcgcacctctcggttcaggaccaaagatctccttgcgatcccaaccagctggcctgaggttatcaatgtccttcgtcgggtggattttgttcggatcggtgtactcaatctggtagggattgggatcgtaagtctgattgaggttggcgagggtgtgattaacctcgcggtgcttggcttcgtcggcgcggacaaacaacagcaggtccttcattttgcggtgaccctctggcatctgccagtatttaaccgagagatcgggtgcctcgagtttctcccacccgggaagcttgccgctctctagttcctcaagagcacgagtataagtaatgacagcctcctcctcaaggtatcccacaaatctgtggcaaatacggggggagatcacgtatgccaggaagaatccgttgaagaagacaccctgggctgcgataaccataaagcgcatgaaccagcctggtttgtccagttttaggaaggtaaggaggtgcatgcgttcattgtatgcttcttcaagtagggtttcaatcctagaacgaaggaagtgggttagtattgaggtgatatcgttttgaatcttgacttgggtagacataccatccattgtccctcttcatcttgcgaagactactgagatgacgcagcatgccgcccaccatgccggggacaccggccacactttccaagaaaataaaccgagttaaccatttttgctcggtcattctgaagaatttcggcaggttctcgccgggcttaggatgtctgtatcctgtcgctgtgtccataccccatcggaagacacgaactgttccaagggcaacccagtcggaccagtttgaagcttgtctgtgggctatgcgaatattttccatttgttcctcggagtatctggcatagagttagtgtctggctcagagagaggggctgccgatatacttacactggatgcacccaggctgtttgcacctgcttgacattaggagtcttgggtggtgggaagaagtccttgttgtttttctgaggtgttgacgagataggacgcttgggtgtgaggctgaacaccgctgtacgcttgttgattccacgtgcgggcttcaatgtctttgctgcaactcccgagtaggttcgtacaacaaggtggtactgcggcttcgccgcagccctcatgggagccctaactgagagagtattcatgatgtggccaacgagagcgagtttgaagtcaagtcaagattgagggtgataaatgtattgtaaatggtgaagatgattgagacgaagaaaagtgaaagaatataaggaagtttagggaatatacagatgtttaagataaagtctcggttgcacagatcaagtggacaccccctaatcttttaaggctttaaatatataacctaccaatcatcggaaggcgaatataaccagggatttgcaaaaaaagttaaagaaagcccctggaactgcttaggttatacccttgggatgatggcattccgtatagttcattgccgcaacacccagatattcccccattctgccattatcagatcacttattcctctagatcatatccctgttgatatacttcaaacaacaactgaatacatcagccttcccattatctctacgccatattccacgttatgaccaagactactcaaaacggtcatatccttgttctcgggagggaccggcccgggtgaacaccgatatatgactcagcccgccaggcgaaggcgatcccgagaaatagccggcgacaaagcccggagttattttgaggtcgttttctggttccgggatcctgaaaatatccattccctctatcttaccggcgactgcatgatcgattggctggtagccttgagaaaaggcgaatatccctgcccgtttcctgccgatcaaagcactggcacggagtctcggcatgaaagatctataataatagatcgatgcatatataaagagcctgtcaaatgtcttcatctgcaagtcaaggtccgcttaccttttgtcaaggctgtcattctccttccttatatccatcctctgccgatactccgtaccgagtactctccttcaatatggatatctctgcggagtaccaatgcatagattatgcgtaccggctttacctagtattataacaagctaggtgatatcatcgttcaaagtacatagttagatgagcattacaaataggttaatagctaatggttatgttttcccttttctattattatccaatctgctccctgaatcgctagtcgcctgtctccatattttcaaccttctacatttctttctcacattctgtgactttgcattcttagccttatcccaatgttttgcctgttgtctgccctgtcagtcactgctacactagctaagccattgggttccagctgttatggctagaagtttgtattctagaaacaatagtgccgcgcggtcaaagagaccccgaacactccggctagtattgacttattaatagcaagaatgtagatttcatcatgattaggtagcatcgtagctgtacggtcaataccaaggatgggtttcgaataatgatggagtagaagaatccacctggctctggcctccacttgtgttctgattattgtatcagagcgaaaagaacccaactcctagtcccttgcttcaaacatggaatctgctgtccgcatcacaacaaacccctcctcgtcatcacgcacatctagctcccgcttctccagcttcacaacaagagccctagagggacccttttggatgcgctggaggaatctctgcaccttttcgtcactgctctgggcctcgccctcgacctgataagatctggtaagccgtctatccggagacacgataagcagtacccacccttccgcaagtggtatttctgacccagccgttgagctcatcgagattagcacacttttgggtgaagtctctatagtacgcgataggtagccactggttaatcgagggactatgatgtcgtctgttaagatggacagtatttcctaccggaagccgacacctagggatccatgttagcgtcagaggatacggtggtgtttaaaggtcgacccaccttgaacggtgccgtggactttgaaagcaatctgaaatggatagcatatcagcaggggaaacctatagcttttgctttacttctagaaatatggctgaatgaatatgtagtagaggacatactcgagtttgtggcatgtgtgacattttgggatgaaatatggtatttggaagagttgggtagaagttgaagtgtatgaggtagaggttgatgtcaagcccgagtcttggcccccgcaaacttatcttaaccttaagggccaagccacgtcgatatcatttgtgcaagacgtcgcaatgctttgcattgaaactagatctgtgatatcaactgggagatgaatacttggaggttgtactcgatgtgatattggctggtgctgattggttccgcaaaaggatctacaacattacaatagacagtacactgaacatttcctcagttatttcgatatgcaagggaaatctattttattttgattttagactgggattttactccgtgtcgagataggatatagatgaggccacctacgtggcggtgcttcgggcccctgagtaaacactggaatctcaatgttccgagttcaacttctccaaacctgcgccggccatgccactgatataaaatgccctccattttcgcctggcttcggcgggtctattcgctagatacccttgacactcgtttcacctcctccgcaatccctgccaacaccaacacacgaccttccaccaaggatacccgcaatgcaatagcccagggcgcgtcaccttcactttggcgcacaccagaattctttgtctactacttgttctttatcactcttgttccattgatgttcaagaccgtcatcgatgtctcgaaaggtgagtgtaggccggagaaaatgctgggcctacaaattctgacagcggatcaacgtcacagaaagccacccagcctactccacatactctcaccttttatcacccggttggatccctggccgtcaggtggtaagtatgcaacactcggcgttcagctattcatatctatgaggccagtcccgactgacattattgctctggccttaggacaactccgatgtgcaatatgaaagctttcgcgacaacattcctgcacttctactactcctaatcgctcatcctttggctcgccgcgtttatcagttacacatcaaccgctcgaatgttggaacaaaacaatcgagctattccgtggtcagtgcgggcgaggcgcaacttgaacagcgaatgcgcttcgacttttggttcggactgttcttcatagtagggcttcatggagtatctgctttcaaagtattgttgattctgtatatgaacttccgaattggcaaggatgttccgcgtgcctacgtgcctaccgtcacatgggtcttcaacctcggcatcttgtttgccaacgaactaagcggtggctactcccttgagcggatagcaaaggtgttctctctggggtctgggacgtcagaagatggagccaccgcgctagtccaatgggctcaaactctcgatcatctagggggcttgatgccgcgatgggaggtacttttcaaggtcacagtgttgcgcctcatcagtttcaacatggataattactggagtgtagactaccctgcaggaagtctaattgaagtaggtcttccgaagccatcaaccccatgtgacaatcaaactgaccgaattcaacaagaagaagcaactagaccctgcgaccctctctgaccgtgaccgggttaagatccctgcagaaccagctgcttttacattccgcaactacattgcctatgtgctctactcacctttgtatctggcgggtccgatcttgacattcaatgactacgtatctcaacaacgatatacatcggcgtcgctcacacgaactcgcatcgtgatgtacgccgtccgctttggcctcaccgtgctctgcatggagctcatcctccactatatctatgcagtagcaatctccaaagctaacccagactggtctgtcttcaccccggggcaactgagtatgcttgccttcttcaacctgcacataatctggctgaaactcctcatcccatggcgattcttccgtctttgggctcttgtagacgggattgacccaccagaaaacatggttcgctgcatgtccaacaactactccgccttggccttttggcgtggctggcaccgctcctacaaccgctggatcgtccgctacatctacatcccactgggcggcggcggtgatggccggcggtcacccggggcgcccaaaccggcttcatctcgacagtccaacttcatgggcaagttcctacaaattcgcaacttcctgctggtctttaccttcgtcgccttatggcacgatatcaacctccgcttgctcatgtggggctggctcgttactctcttcgttctaccagaagttttaggcggcatgtttttcccggcctaccgctggcgctctcatcccactgcgtaccgtgtcatctgtggcattggctccgttgggaacgtccttatgatgatgatagcaaacttggtcggctttgcattgggtctggatggactaaaggatctgcttgccagcctaacaggctcatactctggcttggcgtatatgatttcctgctgcgtcgtacttttcgtcggcgtgcaggttatgtttgaggttcgcgaaggcgagcttcgcgcgggcatcaacctgaaatgctgagcttttaaacagcgtttttaaacatattttagaaattgtttgtggctagaacctggctataatgagatgaatatatatcaagtcttgacttgtatgtcacattaagattcatattgactattgtacagtttttggtatcaattcataaagtcatcagtaggacagggctaggccaagctccttcccaatactagtagggtttcgtatagtaagtacaagtacaccccctaaaagaaagctccacacctcgaatcctcatggaccttgtagcaatccagactacaagttctcaaatgacaacttttgcaccggatcttcccccaatacccacacatacaacaaaaatgccgcccgggccgccccgacgctggcggcttcgctcgcgacgcactataagaaagcggcggctccgccagtagccgttgcatcagccgatcaggaggcacagggggtgcatacgagcgcagcaggggatcattatcgtattgcgacttgattagtttcggtttccgcggcggtttatcgtcggcatccggctcagcgtcggcggtctcctgcatgggcgccgacacaccggctgttgtgtccgccatggccgccgccggacgcttggcacccgcagtgctagccggcgtcgcgctgcggcgcaaagtagcagcagctttgcctcccttggcggcgatgctgttccgtgcctgcgcgacaacgcttgcgcctcctgcgccctgcatgcctcctatccccccgctgcctgaggctattgctgcttcttcgtcgtcgaggtggttccggaaggtcttttgggactgcaggatgcgtcgcacgttcgaggtggtctttgctcgcgtgccgcgggcgccagcttctcgggcttgtttcactggtgctgggatggcgacgtcgcgctggttctcgcggtctagttcggcgatgtgacgtgcgatcgcgtttgcttgtcgagaggagatgtcgccgcccttgccggcgtcgcggatgccgcgtttgcggcctagggttggggccatcgcttgtgtcgggtcgaagcccctggttggggcgtaagaccagcctggtgtggccgttgatgtgtctgagacgagttcgacgcggaacattttgggatttggtgtgttgggaggtttggtgatgatgcggaagtggatgatggccgggggaatttgttggagatgaataaatgtttgtcttgtttgcaggggagtttggtatgtactccgcacaggacgaaagatttagttgatcgattgttgggaaaggaaatgctaatattttagaacctgggactaatttcatgcaaaaagaacaaagaaataaagaaaaagctatcccctggccatcgaaaagcgatagtggtcatgtccagggttgacaagcttcatacacagaaataaaacgcacccagcccatcccagtcataataaatacacagatgaaacatactggtcaagtttttatttctttttgtgcagcgtatcaaccctggactccagttctgtaatgtatgtctggagcttcatggtagccttttgaagtgcctataaagagaacaatcagttctgcaaagacaaacatcgaagagaaaatgggggccctctcaaagactcagcagggagctatagacgtaccgcaatatcttcagacaacgtctcattggcgagacggtactctgttaggatgtaatagtacaccaacgcgccggcggcgacagatccagtcaggaacccgaacacactagtggatattagcaaaaatatcttggacgctgtgaccaattgacgctgaatgtcattgaaaataggagaatttcccataccctcctcggaaagctccaacaggcttgcttgccggtagcgcggtggactcccagcgggcaccggacgacgagaaggaccggatgccgacgcgtccgcgcaaagggagaaagatctttgtgccaataggcatattggcaatattattttaaccgtagaggggagatttatggattgttcggtggaagatggtggcaagtggagtttgttagaagtgacgttgatgaattgcggaggtccgggcggctcggaacttgcctaagggggtttgtatacaaacagggagactacagtcacacaaaatatatgaaatcattcgaatgcgatatctcgtaggaaagctaaagtacataacgtattgcttcccttaattggccattgtgttctcgttgaagagatccgccaaaagatcatttcggcatactatcaaatctacgctgcccataccgtacgtactctcaaacacataaatactcaatcgagcgaaaaacggtcgcaggaccctctcgacaatatcgtccttggctgtctctcggatccagtctgagatgagccatggccgcttaagaccactgcgagcttggggctcgatgctctccgtggggagagtgggtgagcctgcaccgcgtggaccaaaagtctgagaaacttcatctgccagagcgatgggctcccagcggtcgggtggatagaccgcatcaatcgtgtcagttacgaaaagccattcaaggagctggaagtcgtctggggcgaggacaagcagtatgtcgagcagcttggacgcttgaagcagtgagtaagggttgtagacctccggctgagagccatggggtactgctgagatggcttcttgcagttcagtgttgatcaggggccagaatggcgccatgggggcggcagaggtcttgagcgcgactgctcgaagaaccataaatatttccgcccgagtggcggaagatggcgacgaggagctggttgccgcaagaagatcttccagcttctgaagcaacgccggaaattcaccgacaaagtaatcatcgctggcagaaagcaggagtagcgcgattcgccggaggttgagctgcgctttgcgatcggcttccaatcgggccgcagaggctcctacgccgaacatgatgcccgctgagcttggtggtggaaggcggacaagaagttcagatagccgttccttgtcagcgagaacccactggcgcagcaggtccatccagctgttcttcaccaaatccaattgcaatccaaagaatcggacatcattgaacgcgtcggatatgtccttcttccacattttcgccgctgctggtacttttgccatttgctgtagaagaatcatgacattacggttgagattgttagggaagagacgtgaccgaatgagagggcccactacattagtcgagacactagtaatggcggtattgacccgatctgaatcacccagggtcgtgataaacgacggcatagagaccgctagaatgctcagcatgtcatcgggtccagtatgagagaccgaggtacggtcataatccaccgaagatgttgccataggcccagtgtcttggttgaggcctagaggcttgctagtaaaaactgcggtaaggagtcgtaggagaacatcctgcgttataattgttagtgattatgataaaatcagtagtggatacacatactccaagttcttttcgcatacggcggtcttcgccaaaagtcgtattctccaatttcacccccaaaatagccgcgaattcaatcaaacgtggaagaatctgccggtgcgggaatggattgctaagaacatcgcgcaagaaagttgtgcagtccgtccaaatctcgtcaaggacatcatcgtccagtgagcgggcataagtaaccaaaaagctagcaagctcggactcagagagattggatgttaacgaagacttccggctaggatccaaggcattaggattagtgcgagtgtaaattgcattgaaaatggccgggatggtgatctttgggcttgatccgtcgagtgtatggaggagattgaagataagtgacgctgtctccgtgtcagacttggtccacatttccaccaatgtctcaagacattcaagtgcctccgcagtaaagaagtgctccaagattcgtcgtgagcggtttctcattcgcaacgaggtatattgaaatgaggccaaagattcaaaatctggtggagagccactgtgatcgcctgcgccccacgcccaaatagagaagcagaggcgaacggcgtcttggaaacagagaagaacagtcaggcggtcgttggcggtatttgggcgaccttgcccgctttccgagttgaataccccagacaccatatttccgaaaaagccctgcggttggtcagggctcttgactgttggaacgttggactcttcctcgatgagacgttcgtgtgcatttgcaatacaggtctcgaggccagtcagaagagcaattgtgacatgctcggaacggtcctgcggccaatcctctgtttgctggaaggacagctgaagtctgccatatgatgctcgaatttccctgcagaaacattccacgagcatcaataggatctggaatatagtacctgagtatagagggagcacctcgcagagcagcactatccacttgtctacaatttctcgggatttaggtgagctaattccctttaaaagacaatccagaagccgctctggcggctgcggtagctgaggtagcgatggtctcctgtctgccttgtcgctggtgaaagacaagatcgaaggacttgtcagacggtcacgagagctagctcgtaggtgttttggccgaggtggcgggggtggtagatatgcttgtgcgaatcgcaccttcagtgcagcaaggagtgtatcgattagtgcaccctgcaccacaatactggacccctcggaggagataagaaggcgctccaccaagaaatcgtcaatgccagactccactaattcctcggctcggggcccaagaagaagttgccgcatgagctggagtgcgtccttatgtagtcgttctccatctagattcaattccgtaggtgctggtgatagtgtgctgacgattcgaagagatgcttcaaatatggcggaatggaggcttttgaagtctgcattttctatccaagaaatcatattagcaacaattgtttcgtgagaagataattacgcaccttcagctttggacgcttcaaggcgcttctcattgcccagcacatgagtaagaagtgcgatccatccgttgtgcgaaagcgcagagatgatatttgaagctgtctgtaacaaataggcacattccttgtagtcatcaggggaaattgagtaggtgtctgtctttttctcgctagtttcatcagattcagaaagctcatcaagatttgagatgaccacatggaaaaccctagtaaactattagttatggatcacgcgttgggatgaaaagccgtcttacttgtggatagatggcaagtcctgcagccatagttgcacgctttgcgaactatcgctcgactcttgggagagaagatcaaggacaataaaaagtgggcgttcaagcatagaacattgataagagaacaaggtccctccaacatcaagcacttgctttggcggctgctcatgtgtgttgtgatgactgtgattccataagacatagaatcgctcagcttgttgctctgacgaaaggtggcgggatgctgcggttgacatattgagcattaaagctgtcagcgacgcctcgacaaggtggtcaatccaagaaattgaatgcaggagccataagcagcgaacggcttctacgtgaaactttggacttaggggagataagtaccaccaaagctggttgacaagaggggtaatcagatcgcaagcatcctcatagctgacatagaagccgggggtctgaatgaaaaacaaacttgtcactgtcgaagcgatggtcgatatgacagagaaggaggcggttgttggcttgtccttccctgaacctagtcgctgagagagcgcttcatacagtttgcgatctcgtagaacgcgggactttggaagcttcttgagcaaagtcacaagaatatcgagtggctcgtgaacagataggccgccatctcggcttcttagcgccgcgatagccagttcgtgagcctctcggataatcatttcgccaagattcttaggagcatatggaagaggtggaagctccaagctatttttactttgttcatagaaactgtggacagttttcaatatatcagtaccacggccctttgtgtcgttgacagcagtcttttcagagcccgcctttctcgagaacgcccgctctgtgagtaaaccagtcaacgatttgagaactttgttcaatgcagcggtcacggcctgtttggcagtgctttccttggatgagatctctctcatcttgacgagcactgacaatgccagcagaggtacatggatctgaaccatgtcctcctcgcggacattgaaattctcaataataaactgcgcgagatccaagtcacgcaacacttggtcgctatcaatgtctacatcagaacaccggtaatcaaccaagcccagaagctcggagaatatcacaccactttcaacgccatcaaaaaaggcgctcgcactgcggaaaacctcttcgaagtggttctcaggggctgtggattcaaatgcctgaacactgcgtacagtgggcaagaaaactgcagggacaatatatccaccaatttcccaacgatccattaacgacagagctatgcgaaagggcttggttctatcggatggaataatcggttcatgtttgatcatatccagtagaccagtgactaagggttgtaagcctacccggctgaagtattgtgattgtgtgagctccttgccatcaacggacgcagatcgagcggtttccattgataatttccgatcatccatcgaagaactatcgtttggggaatctggtcccaagaaccatgcccagagtcggcggttcaggctcatgtcccgccgagtgaccacacccaccgcagcaataaccaatgttcgaagatcagtagccgcaattttgctttgcaaaatcggagaactgagtggaaggtgggtgacaagaagatcaaggaagttacgctggacaaggagctggtcatcagatagacctgatgcaaaacatcgaatcaagaggccaggttccggtagaatgacagagtcggctgcggccagtatctcaggtgggatgttctgcggatcgttcccaccagccgtgcttggccgacggtctgcgatacctagctttgggaggtagcggttcaaataggcaagaacaccaagccgtcgactagggttcgtgatagatgcgagaaagaggcattgccagaaatactgtccagatgccccggcctcagacgtcctttgtgtttcaagttgtccagcagcatctcgcagtttattcattgtgcgtagtgttggctcaaaatcttcacttgtctcctcttcaaggcctggaagtagggctagaatgattgctttcaaggcgggacggatggcccatggttctagatcaacgatatatccctctaccaaagacagaaacaatgggcggacagtaagagatgcgaaagtcaatgttggcgcaaggccggggagatacaaaggcaggtcgtgcgataagccctcgagctggttgtaaacagatgcatcagtaagcatactgtgagcctttcatgtggccacccatacctttatcaatccaaatatgtacgtgtagacttcgagggtcttttggtgcacgcctgacggcaacgatgggttcaagcactgggcgagtcgcttcgacaccaacactttatgaggaacgatgggctgatcaggcggatggctttggagtgcctaatagttcattatcagcgatgccaaacatcgctactaattcgaggaagctcacctttaacaggcgaccgagaaatgatatatagtcggcccattcttggagagcgttgtcgaagagtgaaagcgctctttcaacactagatgcatatcggcgatagttcttgtcttttttgagggaccctacaagcaccaagtaggatcagacacagtcctctcgtgcagttcctgaggtgggcgcataccttccttgccttgtagacgggagcgtgtcaaggagctctcggagctcgcgggggaattcgacctcggaaaggcattgggatcaagactcatggtgccaatgatggacgtaaaattgttgtgaaatttttgaactaccctccgtcatatttaggacatcgaggatgaccctgtgggaaagggggttggcggttgaatgttgaccagaggccaacgcaggcggccacgttcagttgttttgttccgccttgggatagctccgacttcgccgacgtcaatgcccagcaactatcaaatcggcaaacacaactaatcaagacgtgaaatatttgagctaaacaatgtgcatttaattccctgaagacccgcgacgagcgaccgcgtcaaaaagcgcatgcccgcagcggggatgaatacacagcaagacgcaaagaccgagggccaacagcctatcgagacccccaagcagccgtatctttccaagccctcagtcccagattatgatgagggtaatgagagctcagagggagaacggccacctttacctccgcgaccaaatacgttgagtctattgaacgatgaaacgggctcccggtcagctctacaggcagaggcaacgacggctatctcgcgaaccgatatcgagacacaaccaccggaagctcctggtagcacttactccacactagctgttcgtggtctggcccagggtccaaaagccagggcgagcctcagccagttggcgagcccgcggagcagcgaagctggtgactctgcgagtatcagaagctcagtcccaaatggtgattccggagatgttgaaacgctgtttatggactttgctgctacggagcctggtagtcaaaggggcgctacaggtctacttgacttccctgaattcgcggccgacgatatagacgataatggaattctgagcgaatttgaagcagttggcgaacttaatgaggaaggtgataacgaaggtttgggtcaataataaatcgtctcttgtttcataatgctaacgcatgtcagagctgctcctccaacggtggaaagcgaagcgcaagcactatgtgatcctatccgccgctgggaagccgatttggaccaggcatggtgacagcggcctgatttccggatatgtcggggttattcagaccattatttcgttttatgaggattcaaatgatcatctgcgaggcttttccgctggtgataccaggtttgttgtattgacacggggttctttataccttgttgcaatcagccgtatgatggaaagcgacaatcagcttcggcttcaactggaagcattgtatatgcagatattatctacattaaccctgccttctttaacccacctcttttctatgcggccctctactgatctatcgcggcccttacagggttcggagtcccttctctcatctctggcagacagtttcacgcgaggatctccatcgacgctactatcggctctggagtgtctgaaaatccgcaaacaacaccggcaagccatcaacaatgcacttctgaaaaccaaagctagtactcttctatatggcttgcttgtggccggcggacggctcgtcagtgttatccgacctaagaagcactccttacatccaggcgatctacagctcttattcaacatggtttttgaggccgacggagttaaagccggcggtggagaaagttggattcccgtctgtttgcctggcttcaacagcagcggttatctctacatgtatgtgagctttcttgacattcgggacgatatcgaaactagtgcagagatcaccaaagatgagtctgttgccattgttcttatcagtcccgacaaagaggctttctttgaaatgcaaggaatgcgtgatgctcttgtggaggtgagattacataattccacgcaatcgaatatggtatgcatgtactaatgatgcaatagcaaatggagagaaacggcagtctgaaggagatcaaaacggcaattgataatggccgacccgcaaccactgatatagttcctggaactgtgctacatcatttcttatacaaatcgcgtgcaaacgtacaattcactatgtcatcttatgtccctgaatttgcttcggtgactcgacggcgaaggtgagcaacatcccctctgctgttcacgaatgcttgcaatattaaatcattctgactgtgcctatagattgatgtcgatgtacaacaacttgcacgcgagcattcacgccaagaatacccatgtcaaagtacaccactgtgtttcgcggtcagccacttcgttcggatgggtaacccctgtattcgaattctattgtatcgccgagccgaacactaatcgaaatgcacttgcccaaagcgctagcaagattgctcagtgggtgcagcgtgaggaagagaggctattcatcattggcggtgcggtatgtactttgtctctgtggttattatggcacgagtgacaacactgatcatatgaaacaggttttctgatatcttccctacgtttgcactaagtcataaaacacttttgtggtcgccgggacacgaaaatcaaatcatgcctgaaagagagagggtcacatgagcccaaataataacactggatccgaactccgccagtcaatggacggagttctctgtatatactctctcgtgatttaatatacccaatactacgtccgccaaccttacatatatattgtttatggtagtatcctagtctacttttatatctcaagacctcttcgtagaatttactggtagatattctcggttcatcacgttgcattgctagaaaatccataatacgtagggaaaaaaaaataaaagaccacacatgtggactaatcgattgtgtcctctctcaagttgaagagctgacgcataacctcacccgacctgctgcgcagcgcatcgtgatacatggtgttggttataaactgcttggagttcttgatcttggcagcagtggctgtggccaggtcaaagtgaacatacatgtcgtcgatgtaggttgcagcatagactggcaccttgtttttggccagttgagcctcgtcatataggtccggccattcgtctgttgtagccaggatttcggctgcttctttgagctttgagagttctgagtaagactcgaacatatctttgaagacctggaaggtgggaaatggtgttagatctttctgttcaaacaattctgggttaggttgggttgggctatttaccatctcgccggtgaagtagatctcggacaacgagtcattgatctggaattgcgggttactagcgcgcagcctgtctgcagcccagagcgacggctttctatatttttgttagacacacatatgccaaaagcagacggcaagattttctttacccttggcagtagattgattcatgcagaatggcataaatgatatttttgtccataccgccattactgtcaatcacggaaagagtaggcagagtaaggaatccgaacatctccagatcgtttgagactctgaaaacaatgtctagactcgggttagtatttctactacgacattcacgagacaaagcaaggcttaccgtgtaggctatcaaaaccacctaagtcgtgttagctttattcgactgtctgaatcgagggatttaccgtggaagccgaacatgatgcctagttgctggaagcgagccggagtgagcaacccggatggcaatgcaaccttgtttttggtcaggtattgcatgatattcttaacacgggccacatcctcggggaacttctggtagtaagcttcgttcctctccttgaccttctctattttttgtgtcaatgtcacgaataagccactccgggaaaacagggaagcgcaccataggtcttcgcatagacaggatccggcccgttggtcagggggggaaggccaccagtaaggaaagcttctctcaagccctccgggctggaagttaaatgatatcagcgaggtgttcaagatccaagtatggagatcaatgagtctcaaaacatacaactttgacaagtaagtcactgcacagaagccaccgaaactttgcccaaggatactccaccggcgctggtcagccggatagtcctgtgtcagaacatcacggatagcttcgcaatcacggacaatgctgtctgcacggaagttcttgagatactcggcctgcttgattgcatctccctgacgagcaagggttcccgctgtgagagtcgaactgaggccagtgcctcgttgatccagaaagagcacctagagaatagttgagcatcaatctacaaaaggtagaatttaggagatatgacacacttggtatcccttgctgagcatgaattcgacccaggggtaagactgcggggcaccacatccaaagccagggccaccttgaagatagaccagccaaggaagcttgccctccttggcttctttgccctcttccttagcaggctcaatgggtttgttcaagcgactgatgcttcgtgcaaagagcctcagcgtgtccccagcaggcttgttgtagtccacagggacatcgaagagcagctcagaaacacgaagtttgcctagatagtgtcaaatttatcagtttcaacacccgtgggctaattagtgatgatacaaacctgagacattatggaaacgtcgctcaatcagtttcgcagccatgattgcgatgttgatgcggactgaaaatagagggcgcgttggcgacaagccgctttgcggagaaccgcaccattttttggtctaggccttcctgttcacctgcaatcacccagccgagtgaaggaaaaattgagtgtctttgtttttgtttattcccttgaccaagattgttcatagagagatgtgtaacttattgcatatatggatgagtagacggctttgaaaaaaaaataacattggatgtatgtagctatgcccgaacagatacatgtccgacacggtgttcgatgtcttcaacaaatctttctcagaatatgtgcttgatttggaccatattttagtatgtcctaggatggatacattgtagcaaattgacctgggacataaccattactttgttatgaattctgcaatcggttcgaaagcggaatcattccgcaaaaagaaaccatagaactggccgtctcacgagttcgcacccgagtgtttgttggctgcaagttgccggcctgcctttagcaatagtagagtcgcaggtagctgagcagccgcaaatccaaccataacaatcagctgcgtattgaaactaccagctaaaacgtccttcacctcctcttgtagaagaggaggtaggctttttatcgatctcacattctcaaggaataggtgcagttcgtgcgatgtcataacaccctgcaaacgatgcgttagatgaccatttaatatattagatgcaatggcaagaccaatagcaccaccaagaaagcggaactgaaccacggtaccagtggcaattgctgcaacgaaaggcgatgaactagttagccaatgcatcggtcaccttagtatcaggaagttttcgggagaacacatacctaggtctctgtcctcgacaatatatggtgtcgataacacgaggatgcccatggtcagacccattcctgtcccagcaatgactagatagccaatatctgttgcgtggaagcctcgagtactggcaatggtcgaaagaagcccaataccgacagtatggactgtacagcccacgagcagagtataaataaacgggatgcgtcccctagagctggcgatattgataatagccgcagcaactgcggcgatagcagaatacccaatcaaatagataccggcctccaaaggcgacttgtccaacagaagctgggcttgctgtggaacatatactaggacgacgttgtacggtgcgccgatgacgaacgaagaactaaaagcgtgtcagaagaaattgtacggtaaccgtggatattaattagatggactcacataagtattcccagccatggacgatcaaaaagccaacgcttgggaaatatggggtctctgcccgggatgcccgagatataccattcccaggcaaagaaagcgatccagcacacccccgtgagcacaaggagcgcaattgcatccctcgaagaccatgagaatgccagattggtttcattcaatacggcgactatcaaaaatgagccagccatcatcaaaaacgatcccattatatcaagattagcaaatgagcgatatgaggctcgtgtccggaatgaaggagtgtgctgatcaaggccaaagtgtttgggcatcgcaacgatgatgacagcgatcgcaatagagcacaatggtgcactaataatttagttagcatgcttttcaacacagatgcttagcatccacatacttgacgaaaaaggtccatcgccaggccgaattttccgcaagagcacctccaacgattgggcctatcaaagatgcaaaaacaaggcaaaatgacatgagactgctgtagattggaagcttcgttttaggagctatttcgtagacacataggatcgtcaacgcgtatgtaccagcgcccccgattccttggagagctcggaatattatgctgcctcggtagttagcctctagacagaaaatgagcgcaggactacgctagacatacagttggttaactgtctgagcaaacccacaccccatagaaaatgcgagcagaatgacaagagcagcgattgtagtttgtttcctgccaagtatatcgctgatttttgtccatattgccatagaccctggaagtattatgatatcagtaatgagagagatagagactgtgggagactatctcaagacatatgttcaagaagaaaagaaacatccaaagagtagagaaattattataacatcgcatttgtatcatacctgtgtaggtggctagatatccagtgataatccagcttcttttctcgaagccttccaaatcatctgtgatactcgtgagagccgagcttacaatcgtgacatccaagttggagaggaaaaatccaatcaagagtctatacaccatcagtcttcgttagcaaaacccaatggcacttgactgagcacataccctgtggtggtaagcactagtctccatcctgtcgggtaaacaatttcacttcctggggaaggtgctctctgtgccgaccccttttcttggatgtgccccctagcgcgatctttgctagctttattcgaggtcggctctgcgaacttgatgtggctagacatggttgtcggcctctcagtgatgggtgcgtcaagagtaggtgaagactggagtggcaggcatcgttgcaggcgagaaagttttgaacgtgaccactgtctacgtaggaccaagccccgcgtatcttcaccccaggggcttcatgtggaacgccaggagacgcgcgatgacagaatgtggaatatttacatgcaaagaagggtgatccgcgtcgatcattgaacctagatatgctggattggatgtggcttggcataaatttgcttttctggggcatgcgcgattagatttggaattttgaactgccttttcgactgcttttgatgatattattctccatctttttaactgcgacatggtctggaaagaagggccctcacccgttctattttcctaatctgagacagattctccttgctcagggatagctattcgcccctggaatatgcaaacatgctatacaacatagataaggtcgttcaatgtagtcaagtaaggaggacttgtgcactgccaagctggattcggagagtaacgcgagcttgtagttgacttagcaacaaataggcgaagtccagaaatctctgctccgtaccatcgccccatacttctccccgaggttgacaggataattaggcgcaattagcatccaaggagatgtcaggggcaacatgaacaaagggcctaatgagaaacagggtaaaaccagccttaaagattgcctagacagtagttacttcgtccgtcatagattaaataaatctactcagcgcctgaggcagccaagcaagagtcactatggacatctctaggtacgaagtacatgcctccatctccacatcgcctgtctgctccaaaacttccattgcaagatcactagaagctgttcgaacttcggacttcggacatcgacttcaccttgccccactcatcccgctttccaggcttccaacgttctttcgggacgtgcccaggtgtcttccaatgatatctgtttacatctatctatttcctatgcgagatcagaaggcatcacatattgtttctggaaggtatagccgaacgttatagggagcagatcccgagaccccggcattgtataaattggccagattgttcaatttcccctctccccaacacacctttcggccatgcataaccaattccaacaagacctatggaaggctgcacagggaccctgggactcgggaattctccctagctctgagaacttagcgcgagctagagcttctctccccgcgacacttccgaatacaggatccagtctcgaatttgtccagcggcacattgtcgacgatattgtcccggcattcaatgggggaagcataagtgccaattactatggatttgtgactggtggaactaccccagcagcgctcttcgcggacaacgttgtatctgcttacgaccagaacgtccaggtccatctcccaaatcactcgattgtcaccgatgtggagtataacgcacttggtctccttttagatcttttccaactgaagcgttctgtctggtataatgggactttcactactggggccacggggagcaatatcctcggcctagcatgtgggcgcgaatttattttgcaaaaggcggcgcagagaaaaggctgtcatctccagagtgttggtgaagagggcttgtttgaggtattgaatgcactgggtctttccggggtgcaggttttatccacgctgccacactcctccctcgtgaaggctgctggtgtgctaggcatcggtcgttccaacgtacacaacatctgccgagccgacgacccgctccgctttgatattgataagcttcagaaagaacttgcgagaacagacaaggttagcatcgttgcaatatcttgcggagaggtcaatactggtcgttttgcaacaagcggtgcggatttgagagaaatacgccagttgtgcgacaagtatggagcctggatgcacgccgatggagcatttggaatatttgcccgtgtccttgatgaaagcccagagtttgcaacaatcaagaagggttgcgaaggaatacatctggtcgactcgataaccggtgacggccacaaacttctcaacgtgccctacgactgtggctttttctttactcgacacccgaatgtggcatcgcaagtattccaaaacgcgaatgcagcttacttggctgctggagactccgatggcccttccatcccctcgcctctaaacattgggattgaaaactctcgtcgatttagagcattaccggtgtatgcatcgctattgtcatatggcaagtccgggtatcaagaaatgctggagcgtcagataaggcttgcccggaaaatatatggatggatattcgagcattctggttatacagctttgccagaagcattgtccaagtctgagttgcttgatcggacatttatgactgttttatttcgcgcaaatgatgaggggttgaaccgcgagctaggaagcaagatcaacgagagctcgcggatgttcgtctcgggtactagctgggatgggtcccctgcttgccgcattgcaatctcaaattggcgagttgatgtggagcgagactttgcgctggtgacagatgtgctggcaaaggttgcccagagctaggggaattaagacttagaatctcaacgattggacattcaacgcttaaatctatttttttttatatctctatagagggtatcagcgacgacgaccagctcctcctatattctcagtacggtcagacatgctaacaacctctccaatacccgctgcttcttgctcatcttccagagccatgatctcctctcgactatcccaccacttttcttcggccacagagaacgctgctttgcgcaattccttgattgacttgtcaccggactgttccttctccttgacaatctccatcatgatattctgccattcttcagaagtgcggctgaagaattctcgcaagctttcgaacggccgaggcaatggtcggttgtcattgaaagtttgctcttctggctcctcaacttcaagttgttccatgtccttggtaacagatggcaccgtcacatctgtccgggcaggagagggagcatcaagggacatcgcttcggcgtcagcctcatcgtcttcatcctcatcgtcgtcgtcatcttcgtcatccatttcttcgtcactgtcttcggcttcgttcaagaggttccaattctcaggctccctgtagaataactccttgacaccatccagcttgactagatcaatggaatacatatcgtcgaaggtgaactctcggtcacccttttcaaacgtaccaccaaagatgaatagggtatcatcttgcactgctagctgggcattgaatcgccggtggggcatttcgaagcgaacaaccgagggttttgcgggttccacaggctcctcgggtcggggcgggcttgcttccataacgttatcatcttcattgtcccgaattccaactttagcttccagggctttgaggtttgccaaaagctcttcctcatccgctttgcccctatttttagactttgcattttgatttgcctgctgctttttgcccggcgcgcggggacgtcgcagactcaacgggaagaaacggtttctgtcgatagtccaagcaaagagagtatcgaagaactcgctgtcaatgccctcctcggttagttccacgtcgtggacaccaccaaacatgattcctcgacccttgtggtatgccatggtagtgccaacacggggcgggttgggcgtattagcgggcttctttcgtcgttcccatcggacaacaggtgccgttgacgatggagcctcagctgcagggggtgtgattctcaagaaccaagtatcctggtgaaccatgggccggagagccatcttctgggggccgccacccttgccttgcttaccaccacccgcagctgccttcactcgggagtagcccccgtagagaacagctccagtctcgtgcggtagcagagagaatgatgagcgaggatcgggtttttgggaagcaagggtcaatgtggggttgtaccaagtatattgattacaatcataaatccacaggtcctgcaagtacttagtctgctgggaggtatcctggaatccaccaaagaggatgatgtagttctgtctcgggattagctttatccagaagacatatgctgaattaaaacacataccttgaaatatgtcatgcggtgaccacttctagcgggaggacctttgcctttaacctcgagacgggtccattctcttgtagctgtgtctaagtgccaaaaatcattgtagtgataaaatgtgccttgtttcggcgacgagaactctcctgctgatagtaagtctccgcacaaacaatttcaatatacccagcaagacaaccttacctccaaacatatagatgcctccggagtttcctccccggcaccatgcatggccacttcgaggaagagggctgttgggactagtcacttctctccattcgctgcggtcaatcaaatagatgaaaaggttattgaagaaagtggcatgcgtcccgtcaaagtactctccaccgaaaagcaacagctcgtttcggttcgacggagatgctagcacggttgaagacgaacgtgaaaccgggggctcggaaggaacctcagtgacctttaagaatttggcctgttcttcggcgtactgggctagaatggcatctaggtctgcgtcttcagcatcactgtctgcatcctttcccttagctttggacctcttttccttctgcgcggacttctttgattgcttagccgctacacggtccttgtgctcggctgatttcttagtctttttacccattttggctccacgttggattcagaaagtgaattttcgcgatcttcttttcgtggggcagaaatcatgccttttccccacaccgaattaattgcccccctccagatcgatcagatattcgtctgtaggcgtgttgcttccaccattcgattttatttacatgtaactttggcaaatataagaaataggataagaatgattattcccactcgaatttaatttcttagtcctatttgaccgagtaagttgaacgtagttgctgctatagatcgatttgtttgaccgctcacgtgccgacgcgtcgatatcgggttcgcgattgtgcccatcgccccaaacatgaagatcgacggccatgacagcaacaggcccccatgacgaagaataacttagcaactcatctcaaatggttgttaacccaagggaaacctcttaacccccctctggcacaaaccggcctgcccgaacgcaacaaccacgcattaccacaattgattccccccgccgccgaactcgcggccctggatgatatccttgaagacacggaaaatgagacgaatggttcaatggctagattgttaccccaatcggcgagcaagcctcgattgctaagccgacatgacacggtccccaccagtactctgtcaagtacgaagaaacgggattcgccaaaacaatcaaacatagctcgaggtacgtaaacacacgagacgagtcttgcgggaattatcagactgataccgcctgcacggtgattagagtccttccgagaaccaccattatcatcacacaaaccttcccggcaaaagtcgactccatcgcgatcagacagtttccacgcatctggccataaagatattgaatcgattgatttgacaggggagcttgatctgtccacactatcctcggagactatcctggcgggtgagccgcgcgggtcatgtgcacaagaaagtaccccgtgcggaactcgtgagaaacgcggcaagaagcgcaagagtgacgagtatacgtctgatcttctttccccattgaaacatgcgacgaaagtgcgaacgccctcgaaagtgcgaaccccctccaaagccgctctaccccccgcccgtagagacattatatcggaacagcccacagtcccacgtcagacaactcaaacaacccaaacaaatcccccaagcgcggcgaaacgacctgaatatcattcacctactgccccacggagccatcggaaacgagtgatcgcggattcagatgatgacgatgatctctttgatgactgggctgttagtgaagatccggccgataagatgatcctcgatgccggggagaatttgtatccaatacttcccgagatgagtccagcggcggacgagaaaatggtcgagactaagcattcacgattggaatgtacgcccaaagcaccgttcccgactgcgcaactatcgactcagccgaagaaaatggcagttgtcaaagaccctaccccgtcgacgccttggtcgaagccgtccagctcatcacaagaaaaggatccggatctcctgaagtttttggctcttggaagcaatgccttcggctatgcaatttccaaattgaggtctactctgcagaagaattctgagattgtttatcaacaggccatggagggacagccagtcccggaattgatcgctcaaaacaagactcttgtcgctcagatcgaggcaattgaattgctgcaaaagcatcaaaacacgcacaagggcagcgtttctcgcaagcaagacctgaagcagaacttgatacgtgtgatctcacaaggtctagatccaacaaccatgccagaagagcttgcgcagagtcgagcagttgaggcagagttggaacaaaccgaaacaaaaatctgtcagcttctatctcaagtcaatatcctcgaattagcgcacgattgtccacctgaaccctcctatatgaaacccacgcagcccaccttcgaagcccatgcagtcgcacaggagcccgctcttgtctcttcttcgcgtgccgactcaaacacagaattccgtagccaacagcgtttgcctctcacaagtcccagaaagaccaaagacacccgtcagccagatagctatgaggactgtatttctcggaatatgggctctccactgttggattcgatggatattgatgagttcgactggaatgtcagcgacgatgacatattagaagcggcagtgggcttcgatggtgctcaacagatacctgttcgcgagcaagccagtcaaagccgcaaggtttttgcggagacctctggcaacgtccccaaggtgcccgtcccgaagaagtcgcccggtcatagcgccttctggtcaaaccatccatggtctcaagaagtaaggaaagtgttgaaagaccgattccacctccgcggattccgacccaatcaacttgaagccattgatgcgacacttgctggcaaagatacattcattcttatgcctactggaggaggaaagtcgctatgttatcaattaccttctgtggtaactggcggacgcaccactggagtgacgattgtgatatctccattgctgagtctgatggaggatcaagtatcccacctgcgaaaattgaacgtcaaggcctttatgattaacggcgataccgaccaacaggaaaaatcatggatcatgagccagctctcaaatgcaggtggcgaggggttggaggtcctgtacatcactcctgagatgcttagtaaaaaccaagccttgattagagcccttgagaggcttcacggaagaaacagattagcgccgnnnnnnnnnnnnnnnnnnnnnnnnnnnnnnnnnnnnnnnnnnnnnnnnnnnnnnnnnnnnnnnnnnnnnnnnnnnnnnnnnnnnnnnnnnnnnnnnnnnnnnnnnnnnnnnnnnnnnnnnnnnnnnnnnnnnnnnnnnnnnnnnnnnnnnnnnnnnnnnaaaaacagattagcgcgcctcgtcatcgacgaggctcactgcgtcagtcaatggggacacgatttccgacctgactacaaagagctaggagaggttcgagccaggttccctggtgtaccggttatggccttgacggccactgctactgagaatgtcaaagttgatgtgatgcacaatctcaaaatcactgattgtgaagtgttcctacagagtttcaaccgtcctaatctcacctacgaggtacggtcgaaaggaaagaatgatgaggttctagccagtatggcggaaaccattacaagctcataccggaatcagtgcgggattatctactgcctctcgcgaaagacctgcgataaggttgcagaggatctacagaaaaagtaccacctcaaggcaaacgcttatcatgcgggtatgtcagcaaaagcaaaatcggaggctcagaggaactggcagatgggccgagtacatatcattgttgccaccattgcattcggaatgggaattgacaaagccgatgtgcgattcgtcatgcaccacagtatcccaaagagtctcgaggggtattatcaagaaaccggtcgtgctggtcgagacggcaagcgttctggctgttatctttacttcggctacaaagacacagcaaccttaaagcggatgattgatgcaggagatggcagtggtcagcaaaaaggtcgtcagaaacagatgttgcgaaatgtggttcaattttgtgagaaccgcagcgattgcagacgagtccaagtcctcgcctattttgcggaatacttccgccgagaggactgcaataacacctgtgataactgcaagtccggtttagtgtttgagcttcatgattttactgagcaggcatcctgggccatcaagattgtgcgacaattccagaacgcacaggagaaggtgactgtgctctactgctgcgacatacttcgtggggattgcaaacggcctaaagccccagagcatcgcaagatgccggggtatggaaagggatctgatctcgaccgtggagcagccgaacgtctgttctaccggctgctaggtgaagacgcattggccgaagacaacgtgatcaataaaagtgatttcgctgttcagtatatcatcctcgggcgtcgtgcagcagaatatgagagtggccagcggcaaatgaaactacaggttcgcgcgtcaccgaatagtaagaccaaagccaacagcaagccctcagctgctacgcaaaagaaaaagtccaggaattcaggtggcgatcctcagtcaaccatggtatcttctccggtgcaagctgctcaaaaccgccgccttgaccgttatcaatatgccggtgctccagccgtaccttcctcgctcgatgaggatagtgatggctttgaaccgattcgaaccaccggcaagtctcgccgcgcaaacacacgcgagatgggccctccgattaccagcgatcagaagttagatcgacttgatcacatgcatcgtgtagttgtggaggactttcaagagcacgccaaaatcatgcttcaggacgtgagtaatcgctgtactcattagtacatcataaagaaactgactattgttatagcttgtcgttaagaagggccttcggtgccaaccgttctctgaccaggtgctacgtgatatgggcatatcttttcccacaagtaagtacgatcccttgatgggaattggaacaccaggttaacaaggaaatagatctcactgagctttctgcgatccccgacatcgaccaggataaggtgaagcgctacggccggcagatactgggactggttgacaatgcgaagcggcggtacctggagatgacgcaggaagcagagaccagcggcgttgttccggatcccaaccaccataatgtcatcaacctcagcagcagcgatgagtatagtgacgacgatttgttcatggatgaggcttccttcaatctggacaatccagtcttggccgcacccagcaatgcagttgaaaatatcaccagtcgctacttccctccggcagcatctccgggatatgactctggtgacgactgggaatctggcgcggcgcctcctggctccaagggtcgcaagcgccagcctgccagtggcaaacgaccatcacgacggaaatatggctccgctggaagctggaagggcaaagtcgcgcgaccaaaagtcaaatctggcgatcgtcctacaagccagtcatctgcgccgcgaaagaactccagacccaaagctcccaaatctacgattggaatgatgcctatttgatgttcttcttattgttctttcccatcttttgtcgggatgtttatgattggttcggcgtttacacaagcatctctaggtgttcttttctcacggtttgtagggagtcattcgaaggtagtctataggtgccgggttatgtagtatttgaaatgttcacaaaggaccaggatatagaacgatacacatccatgaatcaataataccattttgttactcaatcgtggaatgtccctcattcaattccccagtgagcgaccaaaatcaatcaatcgaagccgccgtgcatctcgagggtgaaactgcgcgaccttggctctcacaaggaatcttgaagacgccgagtcgcgctccaaatcgatataggtgttagcctccaacatagcgtcgagaagaccatgcatctccttcgcaactgcctcccttttgtttgtgggagcctcatccgcgttccgtttcatgaacttatcaatccgccgctgtgatccatcctccgtttctgtcggctctttctgcttcttgggcttgccgtgtgccgtataacctgcctttagcgtagcatctgacacctcaaaagcatcgcctacagtcgggccgcccagatcctcggcagcaagcattggagcaagagtctcatcgatgaacgtatccaacgagaccttgaggtttgcagacgtgcggtccagttctttattttgctctttctgcagggtaagctgctcgcgtgccacctgtgatggagtctgctcttcctttctcgtgtttgcattgcggattctttgaattcgctctcgcagtccgcttgcgattgattgagagtcgcgtagattagcctcttcaacccgcaggcgctcgcggtctacagacagctgttcagcagtcattgtgacagagaccttgttttcttgaacaagacgtgcggtttcttctatggctataagtgatggcagcaccgaatctgttgctgggagctcatcgtcggacttaagaagcgagtcgtaggctttcctggcccgtcgggcttgggaaatacgggcccaggaatcggtacccgtttctgttaaatcaagggaactgagctcccgcagctataactcatgtcaatcgaggcgtcctactataattggaatgacatagcatgccttgttcaattcatcctgctggcgtttgacttgctcttgaagcccttgcaaggttgcatctaaacgtcgcgtgtaaacatgcaatgcagtctcactgagaggttcttttgccgcttcgtgttctgcttcttggcgcctctgtgcgaatttctggatcttctgcacggtttggtcggcgatatccatgcttattttggtggagtgacgcaaaatgcaaatatttccttctagaagtaaaagaaatacttttgatttagagctccattgtccttgagacttgctgtaaaatgtttgattgaagcctaagagacaatcaaaatatcgaacacgagcatcacgcccatgcaacattcgcgtcgacgtcatgtgaccaggtttcagcctcgacttccttcccccatcgttaacttcacctcttctccttaatcaccgggatttgattttcatcgccttgatttcttcccttcattccacctttcatcgccatttcaccacattttcgtcaataaagctatcaactcgtcgatagcgagttttagcccacacccttgacctcagattcagacgttatcggaggctacagtgtggtacagcaggcaacggtttctggcgcttgatatcttgcttgcctcatttcctatttcccatcgcgttcacccaaggatcctatctccaccctttcgcttccttattcatttcgagcatctcggcagatcccgtgaagcttccccagttgtgacagcaaagccctctcacacttgaatctgcacttcttcccgtcttacatcggcactgcctcagtaccacctttccctcacagcctctccaatcttctcaaagcaccaatttccccttccgatcgccagcaccagcaccttccgtgggaaattctggtgtacataaaacgatcataaaagaagaaaacagatttcattcttgacaccttccgatttcacttgtaagtgaaaaacaaacagcagcacagactatccaagatgtcggcttctccatccaaccttcagtcgaccaagcgtcctctcgaggacccttcgtcgccgtccggtcccaatgaccagcctgaggccaagcgcccggcgctagacaaagtagtcaagagcgatgccgaggcggaaacagatgtatccagtagccaggttcctactgtcgtcgaaggtgccaagaatactcagggagatactgtggtccccgatgcgcccactggcaagggtctccctgtcgacacccaacccatccaatcaacagcttcccaggccgatcgcgcgggttctgatcaaccaccccaggacgagtcgagctgggttcatattcgtgcggtgatctccagcccggaagcagccaccgttattggaaagggaggtgagaacgtgtcccagattcgtcgtctgtccggtgccaagtgcactgtcagtgattattctcggggtgcagtggagcgtatcctgacagtcagcggtccccaggatgctgctgccaaggtaggttttttcttccattcaataggtttgttacgactgttcgattgctaatgacaaatattaggcgtttggtttaattatccgtacccttaacaatgaacctctagaggccgcttctactgcacaatccaagacgtaccctctgcgtttgctaattcctcacattctaattggttccatcatcggcaagggtggcagccgcattcgtgagatccaggaggcttctggtgctcgcctgaacgcctcggacgcttgcctccctctgtccaccgaacggtcccttgtcatcctcggtgttgcggatgccgtccacatcgctacctactatgtcgctgtcaccttggtcgagcagctgtctgaacgttacggcggtcccgcggcctcggcatatgccactcgcagcggcggtcctgccggtgctgttcctggtggtatgcaggttgtgccgtacgttccccagcccgccggcggccaatacggccatcccgacacgttcaagcgtcaccaccctcaccctaaccgtgccggtggtggtgcatatggtgttccctacctgcacggtcagccagcccctgctcctgttgctcagaccccaatgcacttccccgccgctccccaggccccttacggcggcgtaggcccccaccagcccgctccctttgttggtggccctcagcagccgacccctggccgtggacctccaacagcccctgcccctgtcggcgctgccattcccggtcagccattgactcagcagatttacatccccaacgacatggttggtgccattattggaaagggtggtgctaaaattaacgagatacgtcacctcagtggtagtgtgatcaagatcaacgagccccaagagagcagcaatgagcgtctggtcactatcaccggtaccgcggagtgcaaccaaatggccttgtacatgctctattcccgacttggttcgtctcccccttccctaggtgaagctgtgcatagctaggttctaacggattgaccagagagtgaaaagcaccggatctaagtcaagcagcgtaacatacaacgcttgctgagagttttattgcgaggttctgcccaaaattctacggtggttaatgaagtctccttttgtttgccttcgctttctctcagggcgttattccttggttctttctttactttctcgttgtatcttattccaaggcgtgtttcatttcctgccattctaattaacaattcccacacaattatccctgaatcaagtagccctttccctttccactacctgctctaatcaccaccgacatattctattatccacgcaacacagctcaaatcatccatgccccagcattaatccatggcaccaagctctccttcgttcctctctcgcttcccctttaccgctcttatttctctccccttcccccgcctaacccgaaatcttttggaaactaacatgtttcgtctccaacccaggaataggcggcaacatcttcttcctcagaggcgccatactgcgggcatagttctctgttttatcggccttgcgatgcgcctccatactgttccagccaacagccaggaggtgcgcgaaagcttgcccactcggactattctcgtgcggcagcttactcggccggtcgacatgccccatcgaccatgatcgtggccccattgactgtggtagctgctcgaccatcgcgatgcggaagctgatcaagtccgcgtcgatctgcttcattcctgacacttcgagatcactcggaaatgacagcgtgcacagctcagtcacggggtttttggttagtgtttctgtggcagagagtggtgggctgaaggtgacgcgcagtgatgacggtggctggggattgtcgggtgccaaaaactcgttgattagttgaatatctattgtgctgcgagggtcggtccagtctgttggtttggttaggctataggccagaggttgtaggtttctaggggtgggtatgtatatcgtagtttgagaattgtttcagggatgctaaactcacctacaacccagacgatggtgtctttgtcttcgaatgtgtatccccaggatgagcgcgcatgaccgctttggtgttgggtcgcctggaagatcctcatcagactcttgccttctatgctggacgggtcttcaggcttgacggaacgtttgacgcggaagaagacgacctggctaacgattggagacatgctgggatggtgtttttcccgacaaatcgtgtagatgggagagacaggcctagagtatcaaaatacagatggctgatgtcacgagcacatgatgtcacttgcatcgaatcccaattaggaaactaccctggtgccttttccttccttcctatcttgtgcagttggtatctaccttggaagtacatatgtaggtgcttctctatggtctcctcttctctcttcctttctcttctcttcccatctctgctcgaatctgctcccctcgacaccatgcagtcatacacactaatttcccggttatccaattcattccaagataaaagcaatcgactgttcttattctctgctttttcaatcgacgtcgtaaaccctagcttcacacttcccttatgaaatggatatgcttctggcaccatgtggtttgcctcatgctggtacatttcacagccctcgcattcttgatcgtgcggcttcttgtcttatcccaaaacgaaccagtggctcatatcatacatatgtattaccattggttgcgggcactggtgaactctcgaatccaaccattatcacatcgctgtcaccttgcctgagcatctcttccgaatcaatctggttcctcggtgaaatcgaactatcgccttggaaactgcttgcttgcctacctgaagtggggggatactccaaattgaatgtggactgctatctcattgtcgcaacatgagttagggtaagaagatgcagaggatgtcttttacgatatccgatatctgatctctgcttctttgacactccagattcttccatgttgcggtgcttgactaatttatccggtatagctatcttggatttgagattccgttgcctttctatcaaatggcagttcatggcttatggtggcggctcaacttcgtcgagttacttgaatcgtagctatggcattcgatccatatgaatctcatgggccagaacttacactacttgtgaaacttgatatttttccctgaacatcttgttcatttttagatgctctattaatctgtcagatgtccccagaagatcacattgactgcaaacttcatgcatctccccttaattccatactctcgatcctggcagaacacgtatcgttttcctcgtcaactaaaagaaaatcacactccggtcaagatgaactaactctacgtgcgatgatttctctgggccaccagagtgctaaagtcttagcctgggctatgactgcatcgttgtggttctcatctctatgaaatccacctactggtagcgatagacataagtatctatagtgatgctgtgcgtaagcggaaatattggcgtcatagctttgaatctgttgagccacagactccatcagctcttcgtcattattggtaagcttcattgctttcggaatttctatagtaacccaaagagctatatcatctttagggtctaccagacactcgaagcccatcatgaaaggacaactatcagtcgcgcgtcctgccattttgctggttggtagatatgatatgtttaaggaaaataagattttttgcaaagctatttagaggaatgctggtggtgaatatagagagagagactcgagggcttcggggttttatatgagttctgcgccgtaggctagaacaaggacttttgtttggtcattagtacaatggccttgattgaaaccccttgaaaccactttcgttccttgatcgcttttcttactgctttcctaactatgtcattgaccgaatttcgttctttgccaggcgttagggatacatctcaagatacaaagccgatgaagtctgacttatatgtcggaaagacgaaagcaagttccaaatgagaatcctacacttaacaataactagccctcggcaggagctaagctgacgcaaataactgcatgtagataatagggtttgaatttgatagttaatttagccactcactgtgacgctgaaaaaagatccgctacatacgtatctgcatgccatgactccctggtccaattaagaccatctaccaaataacaatccacgctgaaagcaaattcccccaaatatgggatcggaatctttagagaaaacccaaataaaagcgaagcagaaaaaaagaccgaatctaccagtcgacgctgcgcacctttgcctgcttgtcctcgaaggccttcttcaagttggcattcaagcgctggcgacgcgacctgttggccttatattggatggcatcttcttgcgggagggcaggctcaccagcaccctccacgctgcggagacggctctgtctcacagagccattgatgctggcccggaagttgagaccgcgtgaaacggaatcgggggtgtgataggcgctaccgtcaatcgagcctcgcgacccaggagtcatgggtatacggccagcggcgttcttgcggggagtagagaatggggagccttcacggcttggaggccctgtggagacaatgtccacgccgagcttgcgcatctgtgcctcgagaacatcgatgtctgtgctctttccctcggccatgctcatcattgtagcaatagtcttggtgacagcctcgacggttggtcggtttctgcctccgccattcgtttgcggaatatcggcgattttggcacgcaggagagagactgcctgttcgagagcggtaatctcgacctggatattcgtgaatgtggtgcgcagatcatgttggagcgcaccttgctcagcggaaagtggtgcttcgagaatagcgccgatgtcagtgtgtgcgtcaagagtcttgcgaatgcttgcgaactggcctcgcaaggtgacaatctgctttgtgagcaggtcacggcatgcatcgagcttttcatccaccccctgcacccgctggttgtccaatgatcgcgaaattgaagcaatcaactcttcaaatctctcaatgtccttgaaggtcatcttggtgtcgagaatgtcagcgggctggtcgccgttcatgacgatcacccactcatcaatatcagagagtttcttgggctgttggtacagaaggaatcctgccattgacctagcatttatacccaaggtatctaccatagagttgatgtcacgatagagccgttctacctgtccggcaatacctggctttggagtgtcgcccatgtagttttggtggggcaagaatgggtccagggtatcaacaggctcaacgggctgagccagttcatcacgaagtctatcgtcctcgtcatcgtctgacaaagataaaacatcatcttcctgaatttgagctgctgcatgtgcacgtgcttgcttctcttgctcctcacgctcctcacgagcaacatcgctggcttttctcaagtggccgctacgctgggcgatatgggtaagagatgccttacgcgaatgcaatgcgcctgtggaccccttacggctgtgtgatttctcggagaatagcacgttcttcttccctccgacccgaactggactcggtgaccgatagggctcacgattacctttcgcgatagagaccgggggagggagcagtgcctgcttagggatctccccgaatagctgctggggaaggcggcctttgtcattcacattgcgagcaggactatcgaagaatcctccggtggagctttgctcggaagctgcatcaaacgagctctgagctgactgcttggatttggcgattaatgcttcgtcatgtgtaatttcttcgccactatcactgaagtctgacccggctgcggcctcagaatctgcatcggagatacccgattcatcagattcatcagggattggaactgcctcttcggaaggtttggtctttggctttgcggtgaagtcaggaggcagaggtgcgtcctcgggaacagccgcagcctcaacctttttggactttgtcaggaagtctggaggaaggggagcgtcgtcgggaacagccgcagcctcaacctttttggactttgttaggaagtctggaggaaggggggcgtcgtcgatcttgggggcaggtttcttctgattgaggaaatcgggtggtagaggggcgtcctcttcaggttttggtgaagccttcttcgccttagtgaaatcgggaggaagcgggacatcctcggcggagcacttcgacacattggaagaagcagaagtatctccagcggcataactagcccggctggtaggatctggtggcaatggtgcctctacatcgagacttgatgtgttaggccaattcttcttgggtgtctctgtcttatcagacagtgctgacaatgggctggtcacgcggttttggtcagcactactgccaaacatcgagaatgccgacttggtgttctcggccgaaggcgttgtctttgaactgaacgttgatgtaggagtctgtgaagcaggtttgcttgccccgccgaaaattgaaaatgtctccttattcacaggctcgatatcttcagtgtcatccattgattcactcggtgatgagcttcccttgcggggcgttgacaccatctcatcaaaggagccaccaaatgagaacgcaccagaagaagatttgtctgcatttggtccatcattggcagccgaaccatcgcccttgaaggcagatttgagctcaaagccaccttgtgcggcgccaaacggattcttgacttcattggatgcttgaggcgggaatgaggtctgggtttgagacttggctccaaagggcgaggcagaagaggcgtttgcgaagggcgacccttttgactgtgtggccgcgaacggtgatccacctggctgtttcgctgcgaatggtgactcccccggctttgctgttgcaaagccactgaagccgcctccaccggagaaggcgctgaagccagcaccgccagatgctacacctttggcaccgaatgggtttgccggggaggtagactgtccagatcctatagccccaaatccagatttcccgaactgtggctgtccaggggtactaggagtgccgaatgatgcgcccggctgagagggggtcccaaaagcgggagcaagggccggggacgatggctttccaaaggccgggctagggcttccaccaagccgggacggactaccaaatgctggagcactttgttttccaaaagcagttgcacccatggttgaagctcccaaggtagatgggctaccaaagacggaagctccagctggcttcccgaaagctggttggccaaatgccgatgaacctccgaacgatgactggccaaatgcaggttgctgtgccggggttggagctacagcctgtggctgagagggagcttgagttgcctgaccagacgagatcaaccccgaatatgggatattttggcgaatggaatcagcgtaaacgaaccaccaagacgaaaggataccatcattatttagaagaagaaccccaggaaggggcgtcgagctctccaagatatcagaacctggaagcggtgcaatgacattttccgtggctgacaagttttgtgccaggccgatgacggatgtctcatctccagagtccttcaacggcacactagcacgtttggtgtcgtcgcttacttctgtggtcatgaactgaccaacatgaagtttggttcgctcatcgttggccagaggctgatcagatcgcgtaatgagcccgagatcagttgacgcagttgacgcgacaatcaagacatctctcaagtgaggcttgtactctctaattctggtgataaattggaatgcaggaccacgtttcagcataaagcccatagtcgagcagacttctggcaatttctggatgaggaacggcgcctgcttgcggcgggttatgatgtagtatgaagaagctgggttcattcccatatcatcctctgaaacatttggtgtgtatgtcacaaagaaaacatcgttctcaagccatgcgattgatgaaactgtataatcgtaagcaaaaacacatatttggttctgacaatcattcgaaacttactgtggcaatctccctccaggtcagatggccgaggaatttcagccttcttcgttccatctggggtcatctggtatccagtgccatcggccaatccagcaacaagttgttttcctttgttgctccatgaagcacagctgacaccatccttgagaaccgggccattgggtccaggaactaggctcccagccttgagatcggcgataagaagctcgccattaacggtgaccagcgcgacaagtgtcgaggaaggctcagggtttggtgccagtgctcgtagcgacacgccattcgtaggaattgaaatcgctggctgcgcatttccttgtgtgagggtgtttgtatcgaaaaccgagattgtggagccattctccgtggcgagaatcaagccgtcgtcgcccggtgtgaatgccacatgagtaggacgagaaggaaggggaattgtggcgataggctggaatggcttcgtcttctccatatcttctccagctggcgcctcgatggactttctgacaacatcagttgtacttattaccagcgcatctgggccagcgccaacaacgaggcctttggtgtgtgcgacagccagaagtgaggaagtaggagcaggaagcgcgttgtcgggccatgccgttggaaggaagcggatatttgcgtccccggagactcctttgaaaccgacttcctatagctatgttagacaggatggcggtgagttataactgcggcgggttggacatacatcggtaaaaacatcgggaagctctgaaccaagctccgcagaggcgcttcccccagcagggttggacgcaccgaagttgaaagccattctgagcttttcggaattgaatgtcgcagaaggagaacgtgtgctttcgcttagaggagagttatgtctgaaagcattaggtgagggtgagttgggaggtgtggagagtgagcgtcgacggagtgatttaggactccgggagagagtctgagagtatgcgcgaaaatcttgagcttgcgtggcttcccgggaattacaagacagacagagagtaaaaatggacgcaacgggtatcgccgacgcgcaaaatgttggaaagagcgaagtcacaagagactacataaagaagcattgaattcgaaaatgatggtccggcaaaaacaccttgtttatgcctgataattgaggctccaatttaggctgcgggagcttcgtcactccagacagctcacttcctcttcaccatctccagcttgctacctcattcgtccatccatccttctcgatctcctctcatattcgaatttcgctctcttttcttcctatacccattctctatcctgataatcagctcagctggtcgcgaacaccagcgttctcacgatgccgggcttcgacttcacaaactacaaccgcaatgcggcgcttcacgccaggggtgttccccttcccaaggccacaagtaccggtacaacaattgtgggctgcatctatgataagggtgttgtggtacggtcccaagagatgcaaggagattcaaaagagctgtgacccaggagctgactcgaatcgccataacagattgcagcagatacccgagctaccagcggccctatagtagcagacaaggcaagatacaccgatgagattatgtacagtatccttttagagggtctaacatcctttgtctctagaactgcgagaagcttcactacatcgcgccgaagatctggtgtgctggagccggtaccgctgccgataccgaattcaccactgcgctcatcagctctaacgtcgaactgcactcgctatccacgggccgcgacccccgtgtgatcacctgtatgacgatgcttaagcagcacctcttccggtaccagggccacatcggagcgtacctggttgttgcaggcgtggacccaaccggcaccggactgtacactgtgcacgcacatggatcgacagacaagctgccgtatgtgacgatgggatccggatcgctggctgcgatgtcggtgtttgagtcgacctggcaaccagacctggaccgacagggcgccatcgacatctgcgccgaggcaatcaaggctggtatcttcaacgatctgggctctggtagcaatgtcgacgtgtgtgtgatcgagaaggaccagccgacccagctgctccgcaactacatgaagcccaacgagcgcccccagaaggagcgcaactaccgcttcccccgcggtaccactgcttatttggaccagaggattatcagcaaggaagatatgaaaaaatatgttacgatcgaaacgctgtcgggtgatgataaccttgctactggggacagcatggaggttgatacttagattttcttggagatgcactgaccagtggtcttcttagattgatttaatgcacgcatgggtttcttatctcactatgttttctgtatgattgtacttcggcaaagaccgcgggcttactgttgtggggtttactacaaggtttcaagcagttacggccggacaggaaatcggagttttcagaaacttgatgtggctttcatgtaaattgtatgctcatctcagcaccctccctctaggcaaggtatgtattatattgaagcaggggtatcgtatcgctctattttagaaaattcccttgtgtagatatccattcgcacaacacatctaccaccagtcaagcctcgattcaccaatctgaggcaaagcagtgagctcttcaacaacctcagagctttcaaacttgcggacaatccaaagaatgtactcatactgagtagccgagatacggcgaccgtcacgtcggtaccggacaacaccagcatgatacatggcccgcacgaactctggatccacgggcccgccgtgtctgcgaagatatccgtaaagccagtgaaccatatggaaagactgggacggagtcaagtgtttgcagcaggagagagcaaccgccagctggtttatgaggtcgaccgctgcatggggatcagggcatcggctgtttcgcgggcctgggtgatatcgcacgaggaccttctcgtcggggtgtgggataggctgccaggccttgtggaggctgatcttaaatggggtgttgttgttgaggagtctgaggatgggccatatgctctttgagtctcctgatcgaacaacactcaagagctcttcaactgtggccgggctggtgagatccatgcagtggaacatttggtcgaatgtgctgtggaaaagaccttgtattcccttatatatggatgggtttgtccacacttctgctagagagagctggcaggtctccagttgctcaagggttttgcgggtggttttggtaatggaatttttgccctttttgttgagggctaggatcagaaggctattgtatgggagatcgaggtcatgaatttcccgcataaagtccggaaagaatattccgctggtaccttggatcaacgtttcgtatagatttagcaatgagcagattggttgatctgttgctcttgaaattttgctgtacatgggcccagtggatcgaccaagcgttcgtagaagccagagtcgcaaaattatctgacgttgggttgaatggctcagaggggcatgcttgatctgtgtttggacacacgggagagggaaatcgaaccagacctgtgactttgcaacagtcgaaatgacttcggcattcgagaggcaatcccgccatctttcaagcaattggtttctggagtccctgtctgctgaagacgatgccaatgactcggttacacgaatcacacagtccgccgcgctgttaacatcaagctggctgaagatcttgtctggaaatggcaagcttgtctccgaatcgacttccatagattccaaccaagcttgaaccaaagcagtaggccactggctgcggctctctgcatcatgggtttcgatgatgagttcctcggcaaaacgaaagctgcgagtacgcaagagcacttcaagccaagcatcaacaatgtttctgtccagatcgtggtatccgaggatgttacagcacccaatggctttccacatcgcccggtagtgcttcaacaaagctttatggtcccacgatcccagagtcttgtttcgctcgacgataatattgggtaaagcagtaataatcagacagatctcatcggttgaaatcaaccccaactctaaagcccgattgatcgcattcaaaacagcagtccgtttgccgcgtttcgtttttgttcgcacaaatatttcgacagctgcagcataatttcccgatccccgggtattcaggaacggatcatccaagaacgcaattgcttctgtaagatctgggtctgaacgagcaagtaaccgctcgaatatctgccggctgtatcgcggctcccggtggaggtcaattctcaaccgacgagtgaaatcccttacatcttcaatgccccaattcttcccatccaagaatgcctccagcatctgctcgcgtgtaacttgatctgcattggcaatgtacgacggagggccatgagtggaatggggtccaggcgctgggttctggtcggagaaagagaaaggtagttcaggaggacccaaagaatgatctgcgaggccttcaaataaagattagcggagactcaaaagactttgcgtgtcttggccacatactctgggtttcgaatggcgctctctgccacggatggtcggtccatttcatgtgctccctcccattgcggccaaacaggcacgcgatatcttcagctggtcctccccctatactcgccagagcggtgttccttcgctttgcaaggcgtctccgtgcttccaatggcccgggaacacagctcccatggcgccgttgaccgttggcgaagcgacgaaacgtggctgcgagtaggtcatcgctgatccagggatgctcaagtgttggagtagctggcggctttagagcatgccggtagacatgtctgccgaaagacatgtggttggctaggacatgtgcaggccgattgctgtcttgggcttgtcgcgagcactcgggatcaactttcgcatggcagctttcgattcttggcgtgatgactaatcacggctcgctccagtcaacgggccaatctttgggcttccattatcacctgcatgtgtatcatattttggtttgtagcatttagtttagctgttattttcttgttttttttattatgggttttatatcatcttatggcccattgatctttcgaagccagattggttagaccacctcagatgtatatcaaatgttcgcttaacttaatctgtaggtatggaaatggatttatatagaagacaaaaagagataaattgcaatcatgaaaacaacgccaatgtaatgcatgcaaaaatttgcccaccaatggtatctcggagaggaacggtgtgataaaccgtaggacagtcataacaagaaagcggagataacatgaactcatgaagcaggtataccttcattgggaaggggcttccgccctgtcaccacataaaagtccatataagcgtggacacttcggtcctgtatactcttcctcacatcaacgaggaagacttcaatttcgggtttcgaccacccaagggcaagaaagggcttatatgaccacccggacaaagcatcaagccaattgttcttactccaagcgccgattttccttagcttctcatcctccggccaggtatttgtcgggattttgaaggtctgttgttcaacgtcgacgaatcctatatccttcatccactgtgcaatccggtgggcgattcgaaattgtcttggtgggtcggaatcacggctcgatcgtatattaaggtctacccaatcatgcatggcgtatgcgctgtatcccccgtcttggttttcgggaggcatggtctcatcgtcgcattttggtttcgggtcgagctcgtgacattccatgtatgcccccggtttgaggtgtttgaatgactgtcgtagtacatgtttgaatgatggcattgccccagtcaagtggccggtatgaatgaaatcaaaataatcttggttccatatccactcttcttcggttgcatcatcaatcaggaaatggacgtttggtggaacctctgttggctgcactggggacagatccgtccctacgatttcggcgtttggaaacaaggccgctgcaagtagacaatttgagatggtgagacaaaacattggggctgggatgggtgatcatacacatctctattggccatattcctgagccagtaccaatatcaaggatcttctttgggtcttggaggggaacttggaatagcttcccgtccatcgccattttgaacatgtgatgttgcatatccaggcgatctatctcctgctcatcattgggatatatataagctaaacattgaattagccatgttgtgcgagacctgacagagccgggactaaacatacctccctcgtggtacctgtgataggttcttccattctcgacaggataatcgattacactgtcagtcaatgactgcgtatccctgttgtgatatggtcagtcacgccagccttttggtaaagcaataagagttgagaagacggaggtagtagtaccagtagtcatcatgaggtgcctacatgatttcacgttagcaagaaaatcgatagttaaaattccggagtatcaataacgatagagcattgacacgttccataagagcactaaactcaccggacgtctagcacccatggtcacctcgctctcatccagcgagatcaatagtggtaggtttgaggccgctctgggggatggacagcaggtaagctatgcctcggtgaagtggaatcaataattgatctcgcgatattccaatccacgtcccagtatgaatacgggaagactctcagactgatgcaaatccagacatgattgaaagggaaggaggggaggaaaaggagcccgacagcttgggttaagttataatctggcagggcgggaggacaatcccgacaactataacttataagatcgacatttgaaatattcgaaaagcaaaagcaaagcccggcgagtggagcagttcgtgtacaaagctgggtaaatggtaaaaagagggtaaagtatatgaaagagatgcccaagcgctttacgcgtgaaatcatccaaagcggaaattgtacccatgtaatgtccttgttttcgatggggaaaaaggtttagttttctaggggaaatgattggacgagatgaacgagagcgaaattattaatctataattattgtttttttttcccttcgtttcaatgttcttttaaattgccaatttcgcttttctcttttgcttttgttctattcagactcccagaatatatacaacctactagcccgtttattttctcctgtacagaatcataacattctatctttttccataccttcactatgttcggagtggggagagttggattgataaaaccctaggattctttttccggtgatccgccggtgatcttccggttccttgacgtggaaccctagatgatacatgttatgtgtccgtcttattcccaaggcattctacccaggacacatactatcgcgattctccagccgatggctcctaggtaagctcgatcgaccaatagaggtcggttccatctagctgggaatatgcaacccgcccagccacgggccgccttcaacctttctgctgggatttgccctttaaatctggtcgatcagcagaatgatttccaaaaaaagttgtgcagaaccctgcagggtcatcctagaatagtcatggaaggccgtaattccccgagggtatgaaatttcttcttcttcatatatcacgttttcgaatcaaaaagaaaagcgaaagcaaaagcgaaattcggcagtgataataatgggttctatactggggaactctcggccccgtagagacgtggagcaattgggattttccctctcaaaatgaattcaaatccgtaaaatcacggtgcccacgccaagacctgtgctgtttgtcatgcatgtactctgtgctcgggtttgactcgaatatcaaagtatcggaataattcccgaagattcacaaattcctgtatgtataatgctcgagtttccttggtgattcttttctccttatgcatgacgactccgactcctaccatattagctctagcggtcggaagagaggagatgatctgtcagaattagcgtggggcgttctaaagcctgggctttctcctacatgcccaaagtggctccaaaatgagagatgaggggcacatagcatcacggaagcataaaagtttccggtactctgggtcttcattttttttcgtttattctctcatgacgtctgaagttccccgcggtacaaagtgtgacctactcgtacatcgtctagacatatgaagtacccaagtccccatcccgaacttttaggcctaggaatctttcattattactctcgtgcacatgtcgatcataaaaaggcgtgattatagcgcatagtatggcttgtagacggaaataacaaatgtgaccaggtatatccccaatttcaagtatgcatatccaaaccgctccaactctgctaaatacccaaaagatccgaatctgtcaaatcatggtgataccctgattcaaagtaattgttgtctttatatattattatttgaaaaaaaaggagggggaaaaaaaacgcgttaacaatgggtcagtagcccaaccttgcagatagaatcccaagcacagcacccctgcagctgtcccaaaaataatatttcgctgccatggagccgggtttccatccgaagggaacccccgggaatttattattggaattgaaattcacccggacccggcgactgggaaagttgttcgggttccaatgcgtcggtagcgccggctccagagccaatttcccaaaatttctagtcggtaactatactctgtacatatatcttctttaatggacttttcaagcgtttttcctccgctagttgcctaagtatgtcaacgcattttttagttaaactatgtctctctcgcacaacggtagatgcacggttcagtgttcgccgaaccacaaatgaactgctaagtcgtcactccacagcggagtcacttgttagtggggacagcccttggcggtttatctcttttgagatccgtgctttagtcgttggcatttgaatacccactatatgagggacttatacggagtatgtaccatggtttccttggtgtggggagatagggcatcggaaattgcaggttcacaaccgaacaactccgaatacatacgagctgaaacacatgttatacaagatgccaacgctctgaaaatcggataatagcctatcggattcgagttcaagactagaaacaatataattgctttagtatgtaccagtacctagctggtagagttgtacaacacatgttggaaacttcagtcggctaatttgcattggactctaagaagagaaagagcaagtgacaggcattttgagaataatgtatgcagcgggaatcaccctgagctgtaccttgctcccgccctcggtagaataccaactatatacttctgatgtagttaaagcctattctatcacgagtatcttgaatcatagccttaggattttcgccaaatgtacttattactactccgtacgtgtcatgcatatagggtagaacagctgcctgctggcgaaagtatagaccgcttgggtattttcacatatatttattccccacaaataacatcacttgattttattggttgcgggtaacctgtctttccgtaagaattatcacttcacgggcgacctttttagcagctagagttgcacttaaaggcgcacgacaatgcagatacgaaactagccaaaagaaatgcaagaaaaataatcatttccttgttatatccttgaacttgataaccgacacccaataaaccacccatcaaccatcaacctgctatgcatgtaggtgcggggtgaattattcacagacatgatcggctagagatccacatagttcagttcacaccgtcggcgaagaaaatcccaacacgttgtcatctttttacagattaatgtggaacaaattttttagacccctccatcgcttagagaaagttaaatatatttggaattggaactacatgttatttgctgatatgaatatgactggccttgggtggaagtcaaacacccaatcggcacggctcagaactgaaaggtatgagcactacaactgtcagacgcaggcgagatgtagatcatgcacgtctactccgtacagttggtctagagaggaaaatcatccatcaacacccaagccgcctaccaatgagaggttagtatccgaatgttgaacctggtattgtcttgttgactttccctttacggcctggtctcattcagaagatttctctatgttgtagcctgtaggtcgtgctccagaagggtctttcttagctctaggataaacgggttatctccactgctgtggttctattggctggaacgtgtccatcttacaggaacggtgcgaatccgcgagggacaaacaaagagcggctgggatacgacgtacgtaatatagtgggttgcaatataacgtaatcggtaagcgagtggccactgtaagcgagtggccaccccacccaagaggatannnnnnnnnnnnnnnnnnnnnnnnnnnnnnnnnnnnnnnnnnnnnnnnnnnnnnnnnnnnnnnnnnnnnnnnnnnnnnnnnnnnnnnnnnnnnnnnnnnnnnnnnnnnnnnnnnnnnnnnnnnnnnnnnnnnnnnnnnnnnnnnnnnnnnnnnnnnnnnnnnnnnnnnnnnnnnnnnnnnnnnnnnnnnnnnnnnnnnnnnnnnnnnnnnnnnnnnnnnnnnnnnnnnnnnnnnnnnnnnnnnnnnnnnnnnnnnnnnnnnnnnnnnnnnnnnnnnnnnnnnnnnnnnnnnnnnnnnnnnnnnnnnnnnnnnnnnnnnnnnnnnnnnnnnnnnnnnnnnnnnnnnnnnnnnnnnnnnnnnnnnnnnnnnnnnnnnnnnnnnnnnnnnnnnnnnnnnnnnnnnnnnnnnnnnnnnnnnnnnnnnnnnnnnnnnnnnnnnnnnnnnnnnnnnnnnnnnnnnnnnnnnnnnnnnnnnnnnnnnnnnnnnnnnnnnnnnnnnnnnnnnnnnnnnnnnnnnnnnnnnnnnnnnnnnnnnnnnnnnnnnnnnnnnnnnnnnnnnnnnnnnnnnnnnnnnnnnnnnnnnnnnnnnnnnnnnnnnnnnnnnnnnnnnnnnnnnnnnnnnnnnnnnnnnnnnnnnnnnnnnnnnnnnnnnnnnnnnnnnnnnnnnnnnnnnnnnnnnnnnnnnnnnnnnnnnnnnnnnnnnnnnnnnnnnnnnnnnnnnnnnnnnnnnnnnnnnnnnnnnnnnnnnngccaactcagtaatcaattgagaagcttcctgaacagagaggccttcatcggcaggtatctgcctccgggatctagtactttttgcttttgcttctcgttggcagcgcgtaattcgcttacttctttctcaagaaaagcggcagattgcatggtaatctggcaggcttttaaaacctggttaattgccgaactaagcgggctcggagggcttcttgatctcatccgaagcaatgctttaatagacgaagcttgcttttgtaattgaatgtagtttgatggcgtttttgggtcccaatcgctatcccggcttaggggggggggtaggtgttcgaagacaaatattcagctttgaaagtacccgatcgggtgaaaaaggtattaaaccggctgctgagaagctatttttaatcgtctccgatttaaaagcttcaattcgtacagaggggtatgcttcgaggaatttaagtttatcaatatagttgatcccggtccgcattttcatctcaaccaaccggccgtacaaccgttttaccaccgcaaaacaaccgatatcgagaggttgtaaaaggtaagaggaatgcggtggcatacaaattggtataatatcgttttccttacaaatttgatcgaattgaggggttaaatggcttccgtggccatcgagtaccaaaagtcgataccttcctactatacgcaataaagttaatggtataaagagtttctgaagccagcgaagtccaatttcatctgatgtctacccatttggactaacttcaaagcgccagttactaggaaggccttcgaaccatgattcaaggaagaccttgcctttaaaaataatacacggagggaggacccatcccgccgcgtttatacattcaattgcagttacccactcgcgatttctaggttataaaagtgatctccgaccgtagtattcacttcttattatannnnnnnnnnnnnnnnnnnnnnnnnnnnnnnnnnnnnnnnnnnnnnnnnnnnnnnnnnnnnnnnnnnnnnnnnnnnnnnnnnnnnnnnnnnnnnnnnnnnnnnnnnnnnnnnnnnnnnnnnnnnnnnnnnnnnnnnnnnnnnnnnnnnnnnnnnnnnnnnnnnnnnnnnnnnnnnnnnnnnnnnnnnnnnnnnnnnnnnnnnnnnnnnnnnnnnnnnnnnnnnnnnnnnnnnnnnnnnnnnnnnnnnnnnnnnnnnnnnnnnnnnnnnnnnnnnnnnnnnnnnnnnnnnnnnnnnnnnnnnnnnnnnnnnnnctcgtttacagtggccactcgcttaccgattacgttatatcatgaagatcatctacggagtatacaacatatacaatcaatatgtccatttcacctgcttggctctttttggaagacagcatatcatcagaaaactagcatagtcttgttgtcattctattatatcttctacgctagtttggtcgattaggcttcactgtccaactacagaaatatcttccctatatcttaagcacaatactgtcttctgtgggtacgtggctatatttggcccattagctatggcgcttcttttgttttgttttgcctataaaagtcatgtctatcggagttgcggtcaacacgaacaacggggaagatcctcaagtggatatatatagcgttcattccgtcattcactacagaatctaagtgagacttccatagattacgcatgcttagcccagcatctggaagcccagtatctggaacaataaggatatcagcaaataaactttaaactagttatggcaggacgcaaacagcatacttcccaattaggttatattgatatcggcaaggataaactaaataccgacatgacgcatcttgtgatctggagaccccaaatgcagtgcaccaacaacaagcaccaacaacaacatatttctattctgcaaatatcatttcgaagcattagcggtaattttgaattttctcttccttgatcctttgtcccattgactttctgaggaggacggggtacagaaacatcaatttgagtgctgacgcgcgacgcgcgacgcgtaaggcatcggattttaccttctaacaattctgtttgcaatggtacgccaaataccagctcgttcctcaaggagccgggtgacgcccgcccgtcaaccgaagcgtcagagacaggcagacgatcatgctccagatatctatcaagaactgttggaggaggccgaagatagaaatcctggtcaatatgattcggacagaccaatcaaaaggcacaaggccggagataggaaagctatccctgtgggattaggggcttcggaacaaacacaccagggctcagaaaaaaaccaacatagcacccaactagtgcaaactgcttacgattcatcgacatcagaagaatcagacgttgattgggaagacgttgaattacagcaaccgcctcagactttgtggaatgaaaattttgtgcctcaaggcgacgacgaggtgctccagatcaccctagagcaggagcccgagaagcacaaaaaaatgatccaaagaaggaagcccttaactggagccgagagaaaaaccagattggatgtgcacaaatctcatatcctttgccttcttggtcacgtccagttgcgcaacatgtggtgcaacgatgaggaattacaggtgagcgttggctcacatgggatatcgattgggggactaacagcatcataggaattcctaaggaagacactgcctaagaaagtagtggcgcttctgcatccaaatgagaataaaccacattacaacagatctaccacgtttatggacggcctcaaccaggctgcagatgccttcacacgcagatttaaggttactaaaccaggaatgaaacgggcccactgggcggaagatgaatatcaattgaagcagaaattggtatcctctacaagtttttccatcaacaattttccactgacacgaatatgtaggagtcaatcatgtcgaatgctgaagtgtttctatccaaaggagattttcgaacccaagcgaagacaatggaaggctcccgagactttggggctcagctattctgtgccctattgcggtctgtagccgtagaggcgagacttgtttgctcattgcaaccgttgccattttctggcactttgaaagacatgacgccgtctaaaccaaagcatccatatattgtgatatcctcagacgatcatggctcctcagcagatgaacgaaataaggatgaaaaaccacctgcagcttcgaggcctcgacggattggacagcctagattcacaccctcgcgccccccccaaccaaaattccattcaggcatgtcaattccagcgattcctagtctacgtccaactaacacgcataggtccgattgcaacatcgcgagactcgccatttccggtattttgggtggaagctttcaacgaagctgcgcagaaatgggtttcaattgaccccatcgtaacaaaatcccttgctaaaccttcgaagtttgaaccacctgcgagtgattcattgaatttgatgaattatgtggttggtttcgaggacgacgcttccgcaagagatgtcactcgtcgctatgtaaaagcatttaatgcaaagacgcggaaactgcgcgtggaatcgacacggagcggcgaggagtggtggaataaagcgctaaaggcttatgaaaagcccttcttcgaggatcgggatgcggcagagattagtgaactaacatccaaatcagcagctgagcccatgccacgcaatatccaggacttcaaggaccaccctatctatgcgctcgagcgacacgttcgtcgcaatgaagtgatccatcccaaacgcatcattgggcacgtggggttgggaaaaagcgtatcgcggagtgagacatcagaacccgtttatcgtcgagctgacctgcatattgtgcgaagctccgataaatggtatcgccttgggcgggacgttagagttggcgagcagcctctcaagcgtgttgctgtaagtcgaaataaagccgggagcttgagtgacgatgaagatgaaaacgagtctcaagagactacactatacgccgagttccagacggaaatctacgttccaccaccagtagtccaggggagaatcccgaagaacgcatatgggaacctcgatgtctatgtgcctagtatggttccgtctggcggagttcacatcaagcggcgggaggcagttcgagctgctcgaattcttggcattgactatgccgacgcagtcactggatttgactttagaggccgtcgaggcacggctgtattcgggggaattgttattgccgtcgaataccaagaagcgcttgaggaagttttgaggggtctggaagatgagaggcggcatgctgcactggaggcaagaactgcggaggctctgcgattctggcggctctttttggtgaaacttaggatcgcagaaagagtcaaggaatatgctagcgataacgaagaacaacagctcgaaggtatcgaagacgaaatggatgttgaagatgctggtggtggtttctttcctgaaccagaccaaccagccaatagcccgtctttgaaagtcctgggaaagggcaaaatggtacacgaccagaattttcccgaagaatacacggaaccagagatggaaccgtcattgcacgaggaggattatattcttggaggcgggtttctgcccgatgatcatgacccagctccgaacccagtggaaccccccaagcctgcgcctttggccgtaaacccgacatcgattcctgagattattgccaggaaaaaagcattgaagacccctcgctactcactggtggttgtcccaaaccacggcttaaactcgacatccgtatccggagtcctcgcaggatcatctgacaatgttcctatcgcagtggattcatccacaaatggtggctccaaatccgcaagtgtggtcactatctcccggccaccgtcaccagtgcccaattatgattctgatagcgagatcgagaagggttccttgctttctgaggaccctgaagatgaggatgcaattcccgaatggctgatgtctgatgaggactagtttttgatagttagacctgctgtatgctatctatgtacgctgaaaatcaaatattcaaatgaaatattcaaataaaaccaaatcttcagagctgctgtactgcttttggtaacgccttcactaccatttgtgttttgtatagatcacatctcaatcacggttatgtatcattatagcgcaatccaatacaacagcccggccgggctagctcaatcggtagagcgtaagactcttaatcttaaggctgcgggttcgacccccgcgttcggctattcctaaaaccaaacctgagatttctttttttgcttgttgttttgcttttttcatcttccaatttgaggattagacagtccagatttgggataattgcattgttcttttagtacgtgtcctaaactccattgtaaatgcaagggggtggggtctactccgtataatgcacgaaccaagtcgatattagcgacgcgtcgacgcgaaccgccttaggcatctctctcatcttttaccgttaggcccccagtccaatgtttagccttgaaccattgctgttgcgatgaaagaaccaccgcctgaatctagaaacctgccagagactcctcgaaatcagtttcgcactccgagaagccatagtccacaaggtcttccaaccactgccacgaaaaccaagactgcacggaaccgaccaccacagtcatcgacatcggcaagcattcgtaagcgaacatcgctgccacgagttcagtctactctcacgcaaattgactttgtgacacagtccacaccttccaatgatgaccagcttagctacatcgacgaacacaaacgtcgtgacgatacccacgacaaaactgagcggccaaatgtagatgatgagtccgacaaggaatcagactatcttcctgctccaccacttcggtcggcccgtatctcgaaattcagaatgagcgaacgagagcacgattcggatgaacgcccgcagaagcggaggagctctggattcgctagtcgagatacacaccgaagcgatggaccacgaaagagcgaggccccaagggcgagtattcgtcctaggggcggtcgaaaatcactggagaagtcagcagggaagcgggataagaccttaactcagatggactttgtacgacgttacattaccatcaacgatgatgatgacgatgtgaacatgggatatattcagccgacaccgcagaaaaagggcatgaaagatgaaccagccgagcacacgccgaaattgaatcaaccacaaactacgaagcgtccgacctccaccaaacgaaatcgcagagctttggaagaagagctggatctctcgacgggcgaacctatatcccagcaaaacgaagcactgcagtcaaatcctggaagcgaaggtgagggcgagcgggtatctgcagctcccgtgacaccgcggaagcttcgcgcgcgcgagataccttcttcacagacgcctgaaagccctggactcgctattataacctcatctcaatttcgcagcgctactcgctctccttcaaaacgtaacccgccgagtcccacggacaattctacgtatcctgtcaaagaagaaactacggaggctcggcgagtggtcggggatttacaagaccttggaggtgaatctttaccacaaccaacaacattcgattctccagggatctataaccatttgattcaccccgatctgacaactaccgaggaatttccttcatctgcacctccaacggagtcgacttcccaggaatttcccaccgaagaaatcggggactcgagaaatgaacccaccaaaagagagaggacagtcatctatgaaacggacgcggactcagaatacggagactctgaggacaaccttaatggatgttccatgacaccatcttcaaagaaagcaaaccgaccaattggtccacaagacggcgtacaggggactgaacacagcgcggagttatccaaggatgattctcaagaacttcctctaccagttgtgcaatcgagccctggacccaatgatcctccatccgaaggtccaatgtctgatgcctcaatttgttatcgaagaatgcacgcagctacacaattcccgcacgagccaatcccaatgctgaatacacagaagatggctgagctgttccctcacggagacaatacccagtacacaaacttggaggcatggaggccttctcttcgcaaacaggcgacggggccactctcgcagacacagagccaggaaggcgacaaagagtctactgaaatggtccccgagtcatcgcctatccgagaacaagaacgtggaatcgattcaggtgataattcgttccaacgacctcgtgttcctggctcagtggtccaagtcgagtcctcacaggcggtggaccgagatcctcaatggcagggccgagtcctctcacggagccagctgctcacatcaagcgtcatggagagcattccactcccgaacttttggatggggagtcaggatagtgtaggggagccttatagcttacctgaaggatgacattgtttccgagaccattattcaatggattatgatttatgaagacttagaatattattcaatatgatcactctaatctttaccctgaagccgctgcccagtgtgtttatacgctgtgcggtgtgcggtgtacgatgtagttttggggatcgtcgcaagcggggcggtcgggtgatggacgaacgcggagacacagcaaccttgtggttccaaagtctttgactctcttttccctcttgcaacttcctaatcatggatatcgcctacgatcacatccaggaagaggcattttcgaacgaagagggagccccctcggagtctaagcctcaggagtccaacgctaatctcaacgatgagctacaagagacattccgcgccttctccgccagtccatggggctcccgaattggaggattatggaacaatgtacgcaaacagggagaaacatactacgagggtgctcgccaggagtacgcagctgccagcgaggaagccgtgaaaggattttcagatctcagggaaacactcgccgaccggacaagggggctgtctctcagcacagctgctttgacgggcagtggcgagggacaaagcgacgagatcaccacccccacagctgctgcaggggaagtagaatctggcgacaagagagaaggcgaaggcgaaggcgctggcgccagtggagaaagctttattactcggttgaaggcggaagccgctcggcgactgaaggagattgagaaggcagaggaagcagccgatgaagcgattctgcgattcggaatgaatatcggccagaagctgcgtgaggctgttagcattgtgccgcccgataccgatgagtccggcaagcttcttttcgagagcaaggatgctgagggaaagcgggtcattcatgctacacggttcgaggcacagctgcacgttatccattcaaacctggaaagcttcagcaaggacccggtcagtgacgagtggccttcgttcaagaaggagttcaatgtcgaaatcaagacggatgagatcgccgccgatctagagaaatacccagagctccgttcggctatggagaagctagtgccggagcaggtggaatatgtggacttctggactcgttactacttcttgcgtctcgtcgtggagaccgaggagaagaagcgcaaggagcttttgaagggtatattgagtccatcattacggtgattgttgttttccagttttaataacttctactttacaggtgccaatgccgaagacgaagaagaggtcggctgggacgacgactctgactctgagtctcagtctccttctactccacatgtccgctccggtgcccagactctcgcccccaccaaagaaacccagaaagccgagcctcgccggtcaaacgaccagcaatctcaagccgacagcgaatccagctacgatgttgtgagtggtgctgccagccgtacacccggtagtcctaaggaaaagagtccctccgctgcgaaggcggatgagagcgacgaagattgggagtaactccctttttcttttcaaggaccatcagcaagatgatccaagttggttccgagggcacctgtttataccatataccccctgagagcgtggtcttgctactgcgtgcgccagcttaaacacggctccctaagtatctgctttggttggagtttaggaatgtcgggtcttttaattttggcgtttcgggcttttcccctccttttattcccagctttgttttctgcaacttgctttcagcgagcgatgttatctgtctatgcggttgatatctgaatacacgtcattccttctatttgaacagtatctcaccccgggatctgactatctatagcccctaggtagatatcaactgacatccaacagccgctatggatgatggcattcgccaaaacaatttccagcagaggattcgttcgcaaggtaggaggaaaatgcaccccctatctcataatcatgatcataatacatgtatgtctaaggcaccatagtccacaaatttcccattcatttcctattcaatctgtcgcgccaggccctagatctctagcattcagaggcctacccatctttttcgaaagaggcgactcagcatacgcaggcctcataccacgctgactactgggacggacattcggtgagcttttgcgcaccggggtttccggtgtgctttccctggagcgtatgtggaagccctgcgattgcctagtaggcgagtaaggatcgccgccatattggtgggggccactatcgggctcccagccgtactggtaatcctcgccgcggtgtttgacggggctttcattgtaggggtcccagccgacgcgacgacgggcctccgagcgcagccgctggcggtgctgttcgtcaccaccagcgccggtagtggatgattcttccaggaagaagttgaggagctcgtcgctgatggataggtgggattgttgctggaattgctggagggatgttaggcgaaggagggtttcgaggagggagagggaggtgcggatgttctcgaagtgagggttggagactgttgttgtggcaggggcggatgagaatgagtgatttaggggagatgcggagtgggatgaatgccccttctcatcaagcgacagcttggccatcatatttgggtcgattgagggtccgtctgcggatggttctagcttttcagcttcggactcggtatcggaggtttcatcttcgttgtagacttcaaatgcgatccattctgggtccagtccaggaggcagacgccattcttcggggatggagtcttcatgcagataatcgaagctgctgatttccggactgtcctctccgttcagctgtgcatcgagttgagcttgttcctcgtccgctggtccctccgattctgcctgaggaaagtcctcctccacctcgtcacgttccatcatgcgccgtggcgggagagcatttaggtcccgtttcaatagcaacaccggattattcgtttcaccctctgtgctgatattgaggatcctcccggtatctgcgtagaatatctttgaaatttgatgaataggaagaatctcccggattcctgccgtggacacgccttcatagttttcgggttgcggatcattctcatcgattgtgtggactcggccatcatctaggtcttcgatgatcaggacttgataagtgtattcatcggccccggctagtcctggaagctttgtccgtgggcgttggcctggagcttgcaatgcagctattggaacgcgacgcagcttcaaacgtgccttgtgcatgacttccttccacgtggcctcgcgtacagattcttcgtcctgaggtcgcaagtggctggcaaatagcatatacatcgataaggtaaaagttggccctacttggactgcctgagatggggacattgaatattgtgtatcccctgctgtgagaaacgtgcttgcttggagaagtcgggatggcgataccgttgcgggcaagttagtggataacttggccccagaggtggtgatcgccagattcatcagtggcactgcgtcttcaatccgagccaacagattcttgatatctttgataataagcttgatttctttctcgctgttcgtctgatctttggacgatcttgctcctttgcgtctcatttcttcagatgccgcagctcttcccagccgctgtccgaggacttgaatgtcccatctcagagactttgtgagggcgacagcagattccaatgaagtatttcctcgagcagcactagacaaattgtgagctttctgacaattcaacccagtgtcgggtgactcacatcaactcaatcatgtcaatagctggggcgataacttgtatcttgctttccaggcgttgttgcaatgatattagctcctctctgtcctcgctcttgacattctggccaagaaaagagaattgatcagcgcctggattctttctacactcaagaagaacgcttaccttgagcaagcgcgacgactgacgcattgcatagctagcagttatcgcaattcccgacctgtgaaggctcttagcattggatggtgtagttcttccgtcattatcaagcataccgaatagcataattcattgcctgccgggtgagctatatgaattgcacgaattagcttctcgctccatcgccagtgacatacgaaacaaaccccagttaaaaaagtgtccattttggttcaagctggaggccaacggcctttgaactttgcagtgtagatcgtattgacaggcatataaaacacccctgagcaacctatgaattaaaccaggtgcttatcgataagagaatgagagctcaaagggaatgagactttccgacaatttgtagttttgaccttgaaagtagacaatggagtgaagtcaaacagttgaaaaggccataagcataagcaaacatgatggtttcgaacaaacaattattcaccttctcacatttaacagaggaaacccattccatataatatcacgtgaaaaagatatcgcggggtcttagtcattcacccgtgcaaaatcaaaaggcactaagacccctcttattgacccaacctgtatttgtccaaatccgtcttggtttggtattttcgtgttaatacgactttagttcttatttcacgatgtcaaaccaaacacctgaatcctgggaggatgagctttcccgacaggctgagggcgttaacctgaacgcacaatctcgccctcaggcccaagcaccctcattccaacccggcgccgcctctttcacgcctggagcctcttccttcgtccccggacagcagtaccaacagtattctggttatccccagcagggatacccccagtatggtcaacaacaggcctatggtggctaccagcagcagcagcaagcctatggccaatacaacgcctatgcccagcagcccggtggcttcagccagtacaacaatggacagcaacagcagcaatacggtggctacaaccagcagcctcgccagaatgcgcctgtagcggcacaacagcaaccccaggctgcagcacccgcccagtccgctcccaagcccgcatcagctgcccttcccaagaccaaggttctgtctatcggcgccacctcctccagcgctgcccccaagaccaaggtcctttcgatcagcactcctaccccgacagccaagcctgctgacaccacccccaaggaggccaatggtgatactaagggccccgcagctgctgaggcaggctcaaaggtggcggccaccaaaagccttgacaagacagacaaggccgctgccactggcacttctactcctacgccatcttccggccgctctagccctggacgttccagcccagcacgcggcgaggcagccaagcaagctcgcgaggtcaacgccgtcgcgaagtcacagcaaactgatgtcgatgaagcaaccctaaaggaaatttacggtgagcggagagagcacgttaacgtcgtcttcatcggtcacgtcgacgctggcaagtctacccttggaggttccctcctgcatgccaccggcatggttgatgagcgtacactggacaaatacaagaaggaggccaaggaagccggtcgagagacctggtacctttcgtgggctcttgatctgacccaagaagaacgttccaagggtaagacagtcgaggttggccgtgccttcttcaaggtcaccatcccgcacccggagggcgacatcgagcgtcaattctccatcttggatgcccctggtcacaagtcctatgttcctcatatgattggtggtgcatctcaagccgatcttggttgcttggttatctctgctcgtaagggtgagtacgagactggattcgagaaaggtggccagacccgcgagcacgcacttcttgcgcgcaacactggagttagcaagttggtgattgctgttaacaaaatggacgaccccaccgtcgaatggagcaaggcccggttcgatgaatgcaccatcaaggttatcaagttcctggaagccctgggctacaagaagtcggacatcttctgcatgcctatctctgctcagcgcactatcggtatcaaagacagaattcccaaagatgtgtgcgattggtacgacggtccatcgctgctcgaattcctgactgcgttcgagctccctgagcgtaaggtcaacgcgccgttcatgatgccgatcagcgccaagtaccgtgacatgggtactatggcagagggtcgcattgagtccggtatcattaagaagagtggtacttatctcatgatgcctaaccgtgaggaggttcaaatctctgctatgtacggtgaaacagaagaagagattccgaccgctaaagttggtgaccagattcgcctgcgtctccgtggtatcgaagaagaagatttcttccctggtttcgtgctctgctcacctaagcgccccgttcactgcgtatctgctttcgaggctaagattcgtatcttggatctgaagagcattctgacagccggtttcaactgcgtcctgcacgtccactccgctgtcgaggaggttactttcgccgctctccttcacaagctcgagcccggcaccggccgcaagagcaagcgtcctcctcagtttgccagcaggggccagaccattattgcccgtctggaggttactagcagcgccggtgcggtttgtgtcgagacgtacgaagaatacaaccaattaggtcgtttcactctgcgtgatcaggtatgtcttctccacacttttttcttaatattgtttcctaacgtatcgtttctagggtcaaaccattgctattggtatgattaccaagctcatcactcccgagaccgaggcccagtaaagtgattttgccactgagggtgcctgaatgtctatattctcaaaagtgcaacgaatcacaaaataaaagcaatgtgcttgtgagaaaatccgaacagggaggtacgggtgggcagaggtcgcgtaatgataccacagacagtccacaactgatgatgatgaacatttcttttttctacatcctttccgcatatagactttgctccatctaatgaatccaagcggttgaaccgtatatgggttcttgggttatccccagtgatattgggagtagcttatgcgagccagatctgatgaacgatcaatcatggtaataaatgcaaatatgtaaacagaaaggatatctatccgacgggtttcctgtcgttaccaaggcaaatcggaaataaaacaaaacgtattcaacaaaagccccagtctacctcctctttccaacaaccttcgtaaacccatcatcgtcaatctcaggctcagcccgctcccttggagcccgcaccaactcaggcgcctcacccatctcagtatcttcttcctcactctcatcgtccgtctcctgatcctcatctgcagtctcaaccctctggaactgactcgcagcagagcgattttggctcttcttgtggaacttctccaacatctgctggatagtgccgaactcgcctcgatccgtctgcgtctttagctccatgatcatgtccgcgacgtccgcagcgctctcgtcgtccaccgccacgtcaaactcgtcgttcatcacttggacgagcacttcctccaggtccacggcgtcggtctcgggtcgatcggccagcatctcggagatagcgccgcaaagccagtcccgcttctcgtttgagttggcaccgccccagtttgactgcacggctagtgaaagggccggccaattgtggagtgtgagagtgatcgcaaggtcgaggtaagaggcagcatctgtggccggttggacggttgaaattgtcgccattttggagggttaagtttatatggttgttggacctaaggtgcgtttgcgattcttttttttttttttgggcacgactgatagcaccccgcggtctcggtggagaaaaagactgacttgctgatggaatgggcaacttaggtttgtgataatgatggaaacagtctctttgtcttcttgggtctcttcgcaatcggtcgcactgtagcgcaattgagttctcttaatactgttatgtatatggaagtttttttttttaaaaaaaaaagaaataatccgattagatattatatagtcatgtgacccgaactcttggcaatattgcctccaaggtttttcgagcttccttccaataacatatgttggagaatattgtgcgattgagttgaaataataaaaaaaggaaaatctccgatagggggaatcgaacccccggctgccgtgtgagagacggcgatgttagccactacaccatatcggatggggactgcgaattactctcttaagtttatttgtgacctcttgggtttagcgctctctgtccgtgtgtgtttccgtgtgtggttcaagtcccttgctcttccccttccatccaacaaccccgattttctttttcgccttcctttctcctacgcctcgcaggtgaggcatttttgccgttggcctggaatcaccgagctcctgagcaccgctatccccttctcccaataggacgtaaaaatgggatagacccacgtcaagatgagattcggggagatatggagtgaaagtctatacattcaagacctgctgccaagtattcaacagaggtgaatttccccatttcgcatcaaatcatacggattctacatattatgagtgaatcaagatgccgaatatatctggtggtgcccactgggttggtggtccgcatatcaatcgatcatttcctaatgcagattagactcggatattagccaatggcaggctacaatgcagccgagagcctctactccgtacgtcgtacttcttgctgggggccgcccccgatgttttggcaccaaaatgtaagagtaaagaaaaaaaggcccgtgtgttcctttagtcgatggtggcgtggtccctggtggtgccgatcaaccgcccctaccctgctaaagtgggtatgcttccaggtcgaaatcttaaaagagttggggccagttgtgaggtatgaaatagaccagactaattccgcttcaatgtataatgtacaatttatcctaacagggccatagcgaggtgtggcaacgcttagttcaaatgtgtctataaatgccactatatgtcaagttcgaatgatgcgaggatagaagaacatagtgtctagtcctgaggggagaaatgtaataaggccaatcacactttcgaccatgcttttcaaaaaagaatggtaggcggtgagtctcaagataaacctgaagtacatcctaggaagagctagtcctaattaggcagtacaactattaaatcaggcatgcgacgttctgcaccttcgtagccattggtccgtgtgcgtgcccgtgcgtggttgtatataatccctccctcgagtgcaatctacgctgctttcgctcgcccagccccgttttacctcagctttcaccatcaacgtcagatgagacatttttgccccttggcttactacgccgaatactgatctgtcgcctctcttatcaatcggtcggtcaattgccgaacttccgcgaaaggttggacgtttgcaatggttgtagaaccgagcagctatatagacaggttacctttcacttttacacctgcttcttctttctcccttcgtcttaggcatcataaatagtatgcacattttaattattatatagatctggcacatcacaggcattactctagaggtcactttcgaaaacgctgtctcggaaagcctaggttacatgtactcttcaatggtctatctaattcatcccttaattcaaagccccgacagctgaagcgctaaatttagtaactttctagtaattcggacgagtttccaaaggaattgattaataaacgcattcacagacagaacagtaagacagaccaaggagaatagactaagaacaaattgagaaaacaaaaaaagatatatctctatgataagcaatgcatatacatacacagagaaaatcttcaaaggcacatcgttacgacttcttggatttagtcaaatagattaagcgaccaccattggcatcttcgattggcagccgggtcacaagaaattgtgacattatcgtcggacagacgcacagtcttggcttaggaagcgaacgtaggtatcgagctcagactagcgacgtagctgtttgggataccgtcttttacaaaagagaggatgtagtcctgtatgataaatgcaatagtctggttcacagcaccagtgtcaactagactataagataaagtcttctgatttggagtatagaaggtgtattagatatcctgtacatggattcccggccatacgtcgaaaaaatgggtaaaggaaccgttattaaaggcgaaattcaacactgccgcattacagtccatgaagatatcgcccaccgtcaatgccactctctggtagtcattggtataccccttagacccatcaaacacaggcggacagagggacttagtaatatgatcgatagtagagctgttagtataagtgagaatatatttgacgagcgtctcatattcctcatttgtatacaccgttagcaccaaaaccagaccctcatctaagctataggaaatcaaagcctttacagattggtcgtactttccacaacggatcagctccttagggtctgccttcacaagactgccatccggtgtagggccatacatagccgaagtgtacggctgtgagacaccgatttagtttacattcgccgaaactaaaacatcagaaagaagctctcgagcttcagtcagcaacttgacgttcgcctagccgaggtaatcttagaaagtcctttcttggttttcgagcgacctatataggaaataggcataagactgtggcatagcccggttaaagagggctggtgctacccctccgtgtacagtgatatgatacataatagaaccaccgcctgcagattccccaaagacagtgacttatttcttatctcccccaaagcgatagatattgttctagatccactgcaaggcaagtcgctgatcgtaaagtccggcgttgagtacaccaccttccacttcgaatgagggcccagataagaagccaaatgcacctagctggtagttaagagcaacatataccacgccctctaagccaccggcttagctgcgatcaatcaagcccttaggtgatccaaaagacgtcatagacccggcagtaaagcctccgccttagtcaattagcatttctcattaatgaagaatagtaggtgattaccatgaatccaaacaagaacaggtaacaatcttctattcttctggcagttattaaatattttgcgaggcacttggacatccgaaaacagacagtcctcctctccaccggcggagatcgcggacaagtcgctgtaagagacattagggaaattcccagtcttcaaatactcgtttatgtattgtgaggtacgtaactgccaactgcttattccatagggacaggaaatcgactctgggttggactggatgaccgatcggttggttaggggtaacataggagctttccagcgaaggttaccaaccgggggagcggcatatcggatgttagagaagctgtaatgactatcggaatgcttgacttatcattagattttgttgaagcaagcagtttgaaatcgcagcatggtaggatcttatattattcgctccggtcgcctggtagatctcatagcctagatccactataggctgttcctttttggcgcagtcagcgtgaactgcaactagcatacaacccaactataaagtttgtttaactccaaccattgttggtcgcaattacataggttctttagggaaggctctgacccccccggccggtgtatttatatttggactagctggagaatgatggcaagagctaagccgaaaattccctatgtggaactcatgacgaatttatctcgtttaacggtacgaaaaggggcaatttataattgtcagaggccaattcttgaccatgaaggccgaacatgaatacgtgtgtacaagaggatctgcacgaaatcatgcttggcccacttgacccgagaacgaatacacgtatagagatttgccccttaactttcattacatccgccagtggcatacagaattaaaaagcacgtctccagcatttttccaagtaggtaactgtagcagaaagtacctgagtagcagaaacataattcacggactttataccattgctcccatctcgttcaaattgacccttccaggaacatgcgaacatgcgtatacctcgctgggaaacctgactccaaatgtcaccatcactatccacatgagagtcgcgtcgaatacatatgccggccactcattttgtagcaggtatccatcattacccataatgtactctgcaactctgaatatagaccggaccatgatcaacagactgactaggtacagggtattgaggtgccacttccatcgtaaatcttcagaaaagacctcgtgcgttgggtgtctatgaattcggacctgaaacatcaccatgctaacaatgaagaatccgaggaaagcgacctggacaatcagaccaagaatgacaagcttatttccgatgctagcaaggtcactggagatcatcatgccagcggcaccgccctggattaaaaaagacaagacatcgccggtgacaaagagcttggtcaaccagcgaacgggtataagtgaatgtctttcacccttgactgcagtaataattcggcccaaaaccatgtaaatcgaggcagcgaagagggcagggccgagtagtatgaagacattctggatgcaaaagggcatcattcgcccagtcttgtcataagctgacgttcgagcacagtaacctatgaactcaactggtattattagcatgtctcagtctctatgagctaatagtaaatgtccaagtgtacctacagaagcccccaatggcaaagcaaatgcagaaataggtcttcagtttccatattttccaggtgtgatatgcagtcgccgctaggaagagcaagagaaaaataaccgctgctgccctcgaggggacgtaatgccaaagataataacccttgtacgtttgaagttcgggcattgtgtgtgtcaggagcgcgggttggtactgagtgaggaattgcgagctggcgtctttggttgaatgataatataagattgtgattagggttgaaatgttgggaattgaatacttatactctaaggtatgagctcagcagataatatactcgggcaaggatgcgaaaaatgacaaatatccactacagggcattgtctatcgtaactattattagacctgcatcccatgaggagattcctacatactgtctctatatacgcgtatccggtaccagatagagagcaatcttctatggtcattaactaatatacggatacggagtgcagctaacgtacccttactgaagaaagttcgacaacataattgagggacgcgatgttttcctattattgcatattatagtagtaataaagatacctgaagtccgacgtggattggcttataccgtaggttctagtattaaagattctaaactgaaccggaatccttaatcgaggggaagccgtctctagaacctgtggcaacgcgagttgataatggtggctcgtgcatacgcgagtaaaagctttccttgaagatatattccacatatgctccacccattctagtgtgggtcatacatattgccacaacaagctagaactgagagagaaattcgcgtatgcacgggccatcatacgctgccatcatttcagagcccaatcttaataatactctggagtatattcccaatctcaacaaccaaccaattccgtctcgcttttgttgaattcgtgccatcgattctttccgaaatttaaaataccctaggcccctattataagagttaacgatagagacattaggttgttgattcagctaagacttgattcggccagtgcagccattctgcccactccggcccaagataccggtcgatagactggattaagaaactgccaccgtcaccaaaaacccacagatcacgacaggagtgcagaagagctgcataatgcgctagaataacgagtgcttccggcctacggtgcactagcatttcggtatattccaaagaaacaatgattggccaagcgatgacagcattaatattatcgacggccctatcagattgtgcggcattgagtgatgattgtaaagcctcaatcgcttgctcataggtttcactgattgaagggcctagcctggcggctttgataagttcaagaaggcagctgcacgcctgtccgtccctcgtagaattccgcaggcttgcctcagcttcgttcagaatcggcttgagtgccgtctctttgatctgattccaatcttctccaatgactgcgcgtactccgcggtggatacggagatagtggacgaaccgatctagaagcgcttgaaaatcatggtctcgatataccagggtgtcgcatagaatatgaatacccagcatagatgagaatatgaatgcaggtaccgttggcctcatgccgagttccgagtcggtctcatggaacatccgaagtgcatgattctgtaactgcgccgagtggtgtctatacaattcttcctgaggctcgcgaatgatactaaggtgtaaagcagcgagggcaagtagctcattcatcaggtagggagcagatagggcgtggcctatcacttctttatgtaaaaggattaggttgttttcacccttgctcagggaaggcagcgtttctgtagacagatggtagagcagctcagcatgaagcatattgacaggcggatctggctggatagaagaagtagaatctggtggcagcttggtactgggcgattcggctgatactgatggggagattgtcctctttctgctcctcccactggcctgcatgactttgatcgtcatttcgggatattcacataaccgttctgaagatatgcagtttgagcagattggccctttttcatcgcactgtatacagttaggatcttgtctcaacaacaatagaagttctttaccttgatgtggcggcgcttacattcgacgcagccattccgcgacttcttatgcgtcctccgcggcatctgtgcagtggtggtttatcgctaaggaacatagagtatgcctgagagcgggggctatgtatagttgctggctccaataggaagcccactccttaaaaatcggttaagaagctcaaaagaaataagtagaattcaaggaacacaaaatcctgcctcgtagtattgttactgtattatcgtaacttatcacatgatccaccgcaatcggtttaaattcggattttgcccttctgactaatatcctggcaccaacgattagtaagcaagaatgcacgaacaaaagtcacatgagcggtctgtaaaaagacatataattaaagcagtggtatcaaatcttagtccttgacatacacgtatagacgatttgagacccactcactaaggacagcagagttctgcggtttcactgtggatcaccagaccttagtacaatgcctagcgcgagaatctttttttggtcagaacacagggctgtgtgggttggtcctagcgggtttccgtgcatacgcgtatacaagatcacagtcaaacgggattgttgtcactatgggaatgtatgcgcccggaaggcaggcaacttaatttcaagtcatggtatatatatgaattgacattgtcagcccgtcgcgaaaacctcaactcatgttaaattatcgatatgaatatgaagatggcggtcttctcccgcaccttgctctccctgagcgctatttttgttgagatagcgtccgcttccagatgttcgccaagcttgatcgagaagccaaaattgtctggtacttcaatcctcgatgttcaagcccaggaagccctcaacttttctgccgttagccttggaccagggactaacgaaggcggccgatatacaatcagcttctgcaatgttaccgttacccacacacatcctggctggaatgacacaattactactcaagtatggctcccacttgagggatggaatggaaggtttcaaggcttaggtggcggaggctacgctacaggctttggcgaaacttacctaacatacgctgtgtcgcgaggattcgcatctgcctctacgaatggaggcctacctgtggcgaatgggaaagatactatacctacagacctgtcatgggctctgaacagcgaaaacaatgtgaactggttcttcctagaggattacgcatcgaaggcaacgaacgacatggctgtgattggacagcagatcaccaaatcctactacaaaaaacccgcaaactattcatattttgccggatgctctggtggtggaaggcagggcctcttgatggcacagaagtacccggacgtttttgatggcattttagccgtcgctccggcccttgatatacaacgtttcatccctgcaggcttctgggcctcacaagtcatgaaccaacttggagtttatccatcgccctgtgaggtcaatgctttcacggaagcagccgtgaaggcttgcgatcgactagatggggttgaagacggcatcattagctccccagatcactgtcacgtcaaggctgccgactttgttgggatgagctacacttgcgacagcattcggaaaaccttcagtgcttccagcgcggaagttatccaagcggcttggtccggttctcgctctatctcaaagcacgatggctggtacggggtcaacaaggatgcagcgctcggcactgcctatgtgcctaccgcatgctctgcgaaaaacgcatgttactcttttggaagcgacttgtttggcaactggctcaagtatcttgttgctaaggactcgaccttttcaaccagcaatatgactcaggaggagttcttcaaaggcctacgctcttcaaacgttgattattcagggatgctaggaacgaatgaccctgatctctccaacttcaaggcaaaaggtggcaaaatgatcacttggcagggaatggcagacgaagctattccaccgcttgggactattgcctactatgaggaagtgctgaagaacgacccaaaagctcaggacttctatcgcttcttcgaagcacctggtgttggtcactgttacggtggacccgggcctattccgaacggagcaatgtcccaactggttgaatgggtcgagaacggacatgcccctgttgttctgcatgccaccaaaggtagcaacaatacagccagagacctttgcccatatcctcttcggcaaaagtacgttggaggagattctagaaatgcgacctctttcacctgcaccaaataaagttttccttttgaagatttgacctggtcagaccaataatctatagaacttattagcaagcttccagtttgggcccttaaatgaacttttttcttcgtgcctcctacccatcacattactccctccagaagtgaactgaagcaaccctaataaataaatcccaaagctcgggcgattgtagcattagtatacccatatgatagtaacgatacctaccttgaaaaggctatttagcaaaacttttagaataatataatacatcttccacgttttggtaggcaacacaaattttctacttagggtcttccgcagaagcattgtctcgctgcttccaattgaatcggaatctaccaccctaaattagctcgaatttcgccgggtaagctatctgattgaagacttaatcttctcatctaagctgaaacaccatgtgagcagccagtatatatcgcagaatcgctacgtgccaaaagccatgatcctaggtacaaatgcctattgagggttcgtaagacaatttcgatctattttttttggcttgtaggcatcgggccaacattgtggaagaaaagtatgcgccccagacgataacaatgagggtgtagataatgatgacagtccctataggaatagtggtaaatttccatatggcaatagtccctttttggatcgaggtgccccaagacacttttggcgtgtttgttctgaacgagatacgtcctgtctgtcactgtacctttcttccaaattctcaagctcgatggaaggtacagtttcctgagaatcggtatctcgtctactatatcttgcatgttgactcgacgcaaaatcatcggagtcacaaccaacggcagcgatcatatcatgagcaccttgaggctgcctctgagccatcagctttccaccggccagctgcccatgaccccatctcttggctactccccagacattgcaccgaagacgttcgcagttggtggtgctgtattgttgctgccggactatcagatcctcgccctcatctcttttacttcttacatggagcagtccaaagacacttaatttgcccgcaagcactgaactgagtggaaggctgccgtcaattggtttgcggtatatcgtaaagattctactgaactcattgacttttcgcagttcggcaatgcctttctgggtcccaccagttgctcagccgtcaatgccgcctctgtcgacgcattcaaggacacggcctctattgcttcacccgtcggagatgtttcatctgctaagaagtgggctggaattgtgacgtgccaggtcttgcaaagatagaacttgaagagtgcattaattcagaataactaagatagggaggaagaagaagcaagttgcaaagtggaaagcagatagtgaagagggaaatgcacgatgggcagcctggccatgcaggcaagacgaggacgacacaacaacaccaaccatccagggggggtcagctagcaagcatagggatcacatagaccacaccatagcatataatctcctagtacacaaacatctcgcaactcgtttttcattcttggggtgatgatccgtctagactacttgctccccgaaactctacttgacaaccaggctttcgttttctctgcctgaaggacaaggccactaaactaggcatcccgactttccccactgcactagttaactataaattagaaagaatgaatttagaatatcttatactattttatactagattaggttccagaactctactttctgcagaccgacctcgactatacaagcaacggtagtccacagtcccaacagaaagttgtcccaatgaatacgcccgccactttcaagcttcttcgaatcgaaccgaacaatctgcatcacaatagaaacggtccaaactctccccactgcaatagttaatatagctgctacttttcaaacaatgcaaatttcgaatcatctcgctgaactatctagcaaacaatctagctaaagcaagcaagcaaaaagagtatgacgagtggatcgtaacaatcagggggagagggaggggacaaaacctacactctacgcagcaggttcgtgcctgctgaatccgaactatgttatggtaattacctagagtacgtctatagcttccttttctatagagacgagccggtcagccaatcaaagtttatcagccaagtgaagaaagtaaataaggaagtaggtgtttaatttcatcttgcatggctgcctattccagccgatatcactagctttttaccttacgttcatcaattgagctagtaagtttctcttaggtttctcttacttttctcttacttttctcttacttttctattgctctcactttgttctgactcttttgaggaaaaagaaaattcctcccgggacacaattaggctggccacttttcgatggggcgtaatcctgacccttttggtctagcgcccttagtcctgatgtgttcccgtgttcccgtgcgtggttctattaaacccccatttaaccgtaatacaccccatcatcttctgcatcaatcttttcccaggacattctcatctcgtcaagatcgcacatcatcaaccatagatcccatagtagcagcgaacgacatttcatccatcccggaaaggtgtcatattgatcgatttcaggccacgcttcgaggaccttcgcttaaagcactgtcttgtatctttcgttattggtgtcctgctctaaggtttccaccgaagtgcctaacagcgtctgtaggcattccttatcaatgagcatatacattcgatatttattgaatttatcgcgctgaccctatatatcgacccaggccaaagtaagcgcgtattgtatcaagcgaggcaccgtcgaattgcgccgcatcttctataatggttgaactatattgcgcctagattccctagtaaagggcgggatttaccccgggtggcgacttattattccatttgtattccccgaagaatgaccttttgatacaagcttcaagatacttgacgacagtagagaagggggagtcagattgaggggaataggtggtgcgatagataatatatccccaagtccaatgagctttagtttattatatagctcctttgtaggtgcaggtagaggagcgaaagaagcgaaagaagcgaaagaagcgaaacccatcttatgaaagtttgaagaaaggcaaggatgagatgtcccaaaagattcccaaggagaagaagggacaaagagctatcgactttaggcggtcggtctaaccattagtccggaagcccatttccaacacgaccggttacggactgctcctagcttcaagtccaactgccaccttatatctgatctctcttcacctgcgcatctatagctagctcatggtattgctttcagggggccacctggaagatgccataacgtttatacttcaatgttctgatcctcggcatcttaagttattttactaaggtatctagagctttgactccttctatggttctttagataataaatacagcgtttaattgagtgaatggctccatctcaagataataacttcagactttcgggcctccatatagggcagtaaaaagaaaagcaaacaagtaaacacctaggtatactatgcctaagggcgaaggtccagctttataaaaacttaattctatctgtgaaggctggctcgtctgagtcagagttagaggcctcctcctcctcattatcattacctggaggttctttgttcgacgcaatcatggcctgatatatatcctctgctacaatgatcctgctcgtagccttatcagtcccgggagtgctttcgaagtccttaaaggttctttcctgcactaaacagtctggtagcttgtggccggaaatacttctcgacaatgtctttaatatagacttgcagagatattcgccgggtattagccagaataatctgatgttttagtcgagactgccttccttcttgcagtgtatataggtgatgatgaatcggaaatataagaacctcttagctggccgtgcattcccaagaaacttcaattcttttccgtccaggtcctagaaagaggttagctaattgcccaggctcattgaaagaaatattagcttacatcccatgtagtgcatgtcgcgttggcgctgtcttcgtttggaaagcgcttcataactgttgtgtgtcgcattgcttcgtgggctaacacacacttccaacgcgaagatgtcgtgacatcgagctccacaccaagatgtcttgggagtgatagcggaacaacgctggaaagctcactatcacgataatcacgcttgagcttgaataccttcatcacttccttgcgttcttcggaacagttttatgtgatttggcggcactgtcaatctcttccaccttctcgccaaactggtgcttggtgatctttcgatctaagaagtcccttgagacaacgaggagacgggcgtagaaaggtgctttcgccgaactggaaaccgaagtcatcccatagaccgtagcatcccgcttagagctcttcttgcgctcattgtggatagttgctctatgacaggttagctccgtaatatcaacatagcaagttatataaaatactcacccatatagcctaaagcttgggtagccccgagctcaatgtccgacctttttgcttcgacaatcagtacgttgaggcataaagtctcgtcttcctcgtaccagatcccgtagtctagccgggctccgaggtacacccttttacccttaagcctgactgggccaaattggtaggctctttctgtctggacgttcaggaattggccgtatggcaggtccttcgaaacgataccatgtgcttctagcaacaacgcgtcgatgatccgtctaacacctcagtgccagtgttcgagctataccacattagcaatttcactctacctcttcttctgattcttctttcgagctccatacctaaatgcttagggattggcataggcatgacgttctcaagttcattgtcccgtgtgtcaactttgaggttgaaggctttcaagatttctttgcgggtcaatgaggacaacggaacaatcttgtatggtaaattggcctcgctgatatcgtgaacggtctcgcgaagttgacgttcatcaacatttcgatccagaaaggccttggtggcaagaatgagtcggtcgaagagatgtggtttgctggccgacgctttggttgacattttgcgttgcgatggacttcgtctgaaagactggtgagatctgaaaaagtactggaacgctgaaagtaatctgtcggggactgacgactgagaagaaaatgataagatgaaagaaaagaaaagaagaaaagcaggagaagggactatggaaggcagaaaatcaacaaagtttactacctccactacgcaatccacctcatctcgccctgcttccgggacttctcagtctgtaagctaataagttctggctcagtcgggcttttgggccgtttggattgttgtggttgggctccttggtagtgccggctttattatttagaggccagcttctaagggcaatgatcctgagaatatcatgtaagtagtaaaccatgattttcatagaaactatattggcggacctttgcctatatatatattaaggctaatatatcatagaatagccctaaagatattattataagcgagtaggtctacgaagggcagggtattgatacctattcccctccgataaaccctgagactctagagacccctataccctctactatacctaagaagaagaagataaagaagaagaagcggctaactactataagatttacctattttactaccttagcgcgtaatactctctactagataaaagagggctagataaatcagctactagttagaataaagtggtgagagagatatgtagaaggttttattctctacaacgatcgagatctagtcaaatagctaggtgaagcctggcaaaccaggcaacggcatgtgatcggcacgtggccaccacaacaatatctatacgaaaacaatccaagtttataaatcgaaatttcgaccagacaaggtttagtgccgggaagcttaattgtatgatcttgctccttcctcccctcgactcttctctttcttttcctcatcccgccnnnnnnnnnnnnnnnnnnnnnnnnnnnnnnnnnnnnnnnnnnnnnnnnnnnnnnnnnnnnnnnnnnnnnnnnnnnnnnnnnnnnnnnnnnnnnnnnnnnnnnnnnnnnnnnnnnnnnnnnnnnnnnnnnnnnnnnnnnnnnnnnnnnnnnnnnnnnnnnnnnnnnnnnnnnnnnnnnnnnnnnnnnnnnnnnnnnnnnnnnnnnnnnnnnnnnnnnnnnnnnnnnnnnnnnnnnnnnnnnnnnnnnnnnnnnnnnnnnnnnnnnnnnnnnnnnnnnnnnnnnnnnnnnnnnnnnnnnnnnnnnnnnnnnnnnnnnnnnnnnnnnnnnnnnnnnnnnnnnnnnnnnnnnnnnnnnnnnnnnnnnnnnnnnnnnnnnnnnnnnnnnnnnnnnnnnnnnnnnnnnnnnnnnnnnnnnnnnnnnnnnnnnnnnnnnnnnnnnnnnnnnnnnnnnnnnnnnnnnnnnnnnnnnnnnnnnnnnnnnnnnnnnnnnnnnnnnnnnnnnnnnnnnnnnnnnnnnnnnnnnnnnnnnnnnnnnnnnnnnnnnnnnnnnnnnnnnnnnnnnnnnnnnnnnnnnnnnnnnnnnnnnnnnnnnnnnnnnnnnnnnnnnnnnnnnnnnnnnnnnnnnnnnnnnnnnnnnnnnnnnnnnnnnnnnnnnnnnnnnnggggcaacggccacgagggccaaggcaatcgtgggaagggcgcttcccaaaaggtatgcaagctggcaaccatgtaacattgatgctaaatcatggtagaaacgcaaccggggtcgctgcggtgtgtgcggtgtgcgcggccaccgcacccacgaccattggcgatatgcccaaggcagcgccaatgccgggcaaggagccccagtaatcaacatcgctgtaagaagccattctttgacaaacttaaatctagaagactgatactgactgatggacataggggtcggttttcggtggggtcgcgggagtgggctccaccaccaccaatttggcctggggtcgtggccgaggccagaaccgaggggggcggggcggtgggtggagaggaggaagaggaagaggacgaggggcgctgttgccaaggggtattgcaggccaacccgaccgactggaacagctggaggctgcattggcccagcagcaggagaccattgctcgcctccaacaggagaatgccgagctgtcgcgcctgcgactccaagaggggagcgcagagcaggccaatgaggagccgactgatgctctctctatcacagacggccttgatgccgaattcgaaatcaacctggatctcgactccgacggagaggagatgaagtagagtccctctcagtagatgtctcgagaattgaaactttcatcttcggttgcaattgccggttacttttttttcccccaatgatcttcaatgtaagttcgatataatgacaagtcggttattgtacgcggccttcttggtaaatgcacacccgtggggcgaggcattagtacgaagtatcgattgtggatctggaacaagtctaattaaaattaggacaccatttaattcacgtagactgcgtcatcgacctcctgggaactggcggctggcaactgcacgcctttccatcactagacagatcagatgaaaccttcgggagatcaattgcctgatcggaataattattggaggatctcacaaacaacgccgtggatttgcctttggatacgccttcacacctggaagatgatcattctgtcagcttttgagtgcatcgaggaatgcggtctgtttcggggataagcgagcttcggtgctatttgttttcgaattgaagtgcgtagacttgggcaggggtcgtaggaaacgagcggatttgtggtcaatatcagttaggtgaatgaattggttatccctgcatttggtgctgagtatgcctatgcagtatggagaggaattgtcttcatcaagcaagttgactgactggttggttggtcggagagattgaaagtctgaaatctgaaaatgcgaggactgaagcacgaggagagccctcctgccttcctaactagtggtttctcgcttccatctcatctttcccacactttcatctcgctcttcacacttccgaaactaccatcaacagcattcatctacatcatgggtaagcaaatccgcgaacgtgagaccgtcaactcggctctacctcctctactgatgacagatttccatacgagctccaatgccgtacacccacttgtttacaacggcgacttgaatcattggccaaatttctttcagaatgtacgagcaacaatggataaccaacattggagcagcagcgttatcggatacaccctgaagacccacaatcttgatgacaataaggactttgtcggagatgagacaggtgtacagggaaggtttcaacaggcgatcggccaaacacttggacaggcgtttgaagctcaaaggcttgatatccggtttgccgattccaaatgtcttcctaatccagggggaaaagtcccagattgtactatgaagacatcaaggaatgagttgaagcttgtgggtgagctgaaggtgccgtgggttgtccatcaccgtatcgagcgtcgcctaaagttcgagcccttctgccaaaattctcattttcgggtcttagtgggccagattctcggatatatgaaagagacgggggtgtatgtacggctttctgtcgaattatgaagagacgatctttctccgacaacgccacgacggtacgacatgggtcgtggattgctccccagtgattctggcgtccaatatctacaccaaaagatctccggtggtgaccgtgagagaatgctttttctatattgcgatcctggcgcgtgggcaaggcaaggttgataaccaactacctccaaaagctgggtggaatcaataaaatagggcacgagaaaactccgcttcatttatggagctgtgagtaagctcccctctcctaccaatgtagagaggtgtgggtatctctgaagacaaaactccccatgcgagtggatccctttcctttgtcgaatgtgtgatcaagtgtatagaagtcttgacttagcgctccattcagtcttcaatgaaacttgtcaacctactcaaatttcctcgctgctttcaatctgatttactatctggagtagtcgtaaacttagggaatcgtcaattcatccttgtaactccctgagtgtcagggccgccctctgaaccttcgtaggctgaccgttccttctttgggtgttcctattctttctcccttctcaatttagccgccacttgatatatagaccaatggtctggtcgcttctctctatatattaggcgaatacagtatgggattcaaagagtgcatgggccctgctctcgttgggcaatcatctgaccaacctcgattctcaccctacgcattcgacttgcaaccggtgatctctcccctgctggactaattcttcccacaaaactccacgtttgtttcatccgacaaaacatttaattgcaacaaattggcagcgacatgatcgatattctacgcctttttacgcttcgacttcatcaatttgagggttttcatactggcctgagaatttgcgccgattacaccacctaaacacctagcccgtctatctaggaatcttcgccaaagcagtggctcatacgcaaggtaaacccgggacccgggggccatggtagcctctgaaggacaccgcctctctgagatctgccaattttgggtccgctttgcattaagaagggtcgttatttcaagatttttatgacgcaaatgccatggaggcagatggattagcatatttgcttgcttcaacagcgggtgttttaccactatcattgccatcatcgtgatatatgtgatcaactttgacttccattggacttttacagttctcgaggacttgattacgtccagtatgcagtatatcacggagactgacatgcagcgttcaacctcatccatcgaaattgacatcacgctctaaacggcgaatcggtctatcacacaggtagaatatggaggcaaaattaggattcggacctattatgatgggtctggatcagtagatattactctgtcaatgtcagcaataattccttgagaatggcatttttataaaggccatccctgctcataggcttccaggcggtgccggtccgaccatcctaccgattatgaattgatgagacaccgtgtttgatgttttgatgtttgttggcactggagttttacgttttccgaagttgcttggcagttagttcgtataatcatgaatgccgtagaattgtattatagcataacttcttcctattgatatcaatcgaatgattccttagtttcgaaaacgtggcctatggataagctttaggataaacagagtcgagtgtgacttatacatgcagagtccagaaatttcggctacaggcctccacgctattagataagatctggaacatctccattgttatatttgagagcaaaagagcctactggaggaatattaagtgaactttgaataggtggaaacgtaaattcggagatcgttaagaattggattgatcacgaagcaaaatcttggaagacaatagaatattactcgcaccttcaaaacaggggagttactccaagaagaaactcgttatgagagatactcacacctcaaaaaaggcggagagtttaccttcgaggatcactgaagcggtacctggatgttctccctgtcatcaatatcaatagaaacctgcctgtatcaccactcccatttatcaagatcctcacaaatgttcccccagacgtcgcgcggtggtggctcgatcaagttgaaataagccagaatgcgatccccccacttgtcgtcagttggatatgaagcgcgaaacgctgagatccatagatcggcgcattctttgtcccatataatctttgtgatatccccccctcctggaccccagccaaaggacgacatatccctgactttgcgttagcatgatctcaaagacttgactccgcacttactcatatgcagcccggaactttcggcgaacgagatcacgttttggtcgctcgaatgaccagaagagttccggagtgaggacctgcccggggaccttttcccaaacaagataggttatgtatcctccaggtacaggtccgttttccccttgcgtggattggccatatccaagtagtgaaggtacacttttgcatccaccttggctgaacttcttccgagctttggcttcccgcttttcaaagtgaggatttgcctgttgggctcgaacctccggcaggaggaattctgttccctcatcaggaccttgacagtagactctcatgaaggcgtgattattggggaaatgttgatcgtgacatagatacttagcctcccaaccggatggctgttcgtcgggatcagaagtaggctcacgcactccatcgactctattctcataaagcttctcgtcgatcacccatgtactcgcattcagctggagatctgcggagccaggaagggcgatctgagtgcctttgaagatctgagagatatcagtcatcttggagattagatgtagagtgcggaagaaggttgcgaggatgaaaagggaagagatttctgagagcacagaagaggaaaagaaggaaagttcggcattaagtgaagggagatggactttgtggggtcaaatgattatttggtggtcattggcttgcaccatggtacctgaggcaacaccgcactacgaaggggcatagcggcggcagagaaaaaagaatgaccgaattaccattacacactctgtttctcttcactcttttcgttttccttcccacccacccccacaaacttatttcggccagtcggcgagggtcaaagatgatggactggttgctctgcttgcgatggagcaaagtcaacgcttaagaatgtggggatgtggatctttgtgggtcgggaatagcctgagtctattataggaagaggttctctctcactacagcctcatgatgttcgaattaaggaggcaaggtagaattgtattataatgatgatctaccatgtcgattttgaccatagcggggcacttcacagtctcgtcttcttcaatctcatacttgtatcctactccaaacgcttcgagggttcccagctgcagaaggatttttttttttgtaaaataggaagctatgaacgtagttacgacgtagttggtacagattaagcaggcacgatgttgcgtagagggtacatcgtatttcccccagcagcgtaaaattgtattcacaacatcgcagccatggcaagcaatattccgaataccataaacatcgttgatgtgcttcccgcccctagtctacctacctccactacgcaatccacctcatctcgctctgcttccgggacttctcggtctgcaagccaacaagttctgactcagtcgggcttttgggccgtttggattgttgtggttgggctccttggtggcgccggctttattatttagaggccagcttctaagggcaatgatcctgagaatatcacgtaagtggtaaaccatgattttcatagaaactatattggcagacccttgcctatatatgcattgaggctaatatatcatggaatagccctaaagatgttattgtgagcgagtaggtccgcgaagggcagggtgttgatgcccgttcccctccgacaaaccccaagactccagagacccctgcgccctctatcatacccaagaagaagacgaagaagaagaagcggctgaccaccacaagattcaccaacttcactacctcggcgcgtaatactctccaccggataaaagagggctggacaaatcagctgctggctggactgaaaggctcggtatgctaaggagatgccgaggcgacgggcgtccctctgttggtttaccctttttttctctccgagaaccttagcgaggtgagatgaattaaaacggaactttttactaaaatgattcggtgtcgacgaatcgtcgaaattccattgcccaccctgagaatcggcccatacactacgccctccaacgcgatgcgcaacactcgtggcggatgcctcccccctcctattgcacatcgcgatgcctaatcaaggcagagataatcgaactcaaactcacaaggaaggccttggtattttaaggagccctgtctccatggccttctttttacgagaagcttatcgataatcatcgagcccaaaggtggtgccgaggcactggagcatcccggcaagccctgcgcccaagaaatgataacccagagagagtctgcgtcggagatgagcacgggcttcaaggccgcttccagcaggcaattggccaggagtttggagcggtcctggaggcgaaatgggtcgagttctcgttcgccgactttaaatgctcgggttccggatacaaaaaacgcccgatgttgtcgcgttgaattagaattcaaatggactcaatatcaagcttgtcggcgagctgaaagttccttgggtaggcgcatagactaagtgatgcgattaccaacaaccacgctggactcgtcatcaagctggcacagcccctgagagacatgcaggagctgagttgtgagtacggatctcgacatatgacgaaacagtcttcttgaggtaataccggtctcctgcaggggcttgggaggtatggtactccccacccgttcgatcaatcgactactatatcccaacccctctagcctcccagggggctggtagtacgttcactcaggtgtccatgaaacagtgcatgttctatgtatgcagtatcgcaagtactgctgaagaaatagataacgacacagagcattgggtgaagcctaagtgagatagggttcatgtatgttatctcataggactaccttttctgtgaagtactggtgatacgagataatatgaatttcgaagctatcgcagtggcctatcgtccctaccccttcgccaccagatccaatccgacgtatttagatgccggccgctcttttcagggggtttggccaaaccccacatttcataggtgagtacggatagtggttggtcctcaatcttcgcagcaaagcgaaatccagcgaaatgtctaatataccaagtcaatgatctgcaatgttcagatagccgttggggacatgtgcttctggtccttgtctatcctgcccatagcctgaaagccctgggactgcttgacacttgcttttgctaagtgtagtcactgcctcgtactctttgtgcacacggctgcttcagcttggagctctctgacctcccagctactgcggagggtcttgtcgtatggtatctgaacatacattcagatgaagccttcttcagtgggattggcggtattgtggcatgtgaacttcaggacggcgaagggagggccgcccagcttgtcccgctcatcggaggtaagggtctgataatagaccaggcctgatttagctagattatgaccatacagtcacgtgggatttttatgtcccgatggtccatacctacatacagaatgaaccatcattatcttccccagagcttctacagtcataatttacgtagcataggaagttaggatcggtcgctttgctctgcgacacgactatctcggcggactgcggccgccgagatcactggtagatatatggtaacaatcatgcgcttaagctggttggtaatatggcactagtcctaattagatctgtcaagaatgggatatgacccctctaggccctaaacaggaaccttggtttttgttaaggtctagtggtaaattacgctgtacgaaattcgacaagatctataaaatcccctatacggaatcaccacgattatctcccacaataccatgtacaaacgtggtctttccgctgtaaaattctttccgtaaattacgttattaggcctaccgctgtgtatcgttgtgcgtggttctataaagtcctccctatcgcccttcaactttctggctctggctctcctggctgatattaagaactctaacttttctaaaatgacaaaacccgcaatttcaacaatctgtgcggacatcgctaactaactgtaatacacactcttgtatggtatgccgagtaccaatggccggctttctactcccttagcttcctagcttctttggcaatttgtgggtacacctatcttgcgccggtaatggatttgtatcgttatctcttcgacgatctgtgtgataaataattctgtatctactcgtgccgttccgcggaaggcatccatcactaatcaggaacggcgataacggcgaaagggatgattcgacatcgtctttttaagtaaatcgaccgttctcacgtattgtgaatacttcctataaaacgcagagccgcgactaggggtataagaccggctctgatttgcactatggtaaagtaccaaatacaaaattaatctgaattatttctaccaaatgcttctatctcgtaacagcgtaagtcaagtggtccatgtataatcatcctatctctatctaaaatctagggctcactaatctagaaaattatatatacccttctatcagacatgtagttcggcctaggtacgtacctacgccggttcctagtccacagcaaagttcaacgcgccgtatactagcgaggctacggaagtgcataccactaagctattttaggtatgaacttgtccgtagtaccatagagggaacggacgtctctctgacacactctttttagtaaatgtccctcattagaaaatatctgtccctattgagttatcgtccttcaacagaatagtccctaaatctctgtgatatggcttcattagagccgcacaaggttttcctgataacggaattccttgaactgatcctactcgcaactaacacgcgcactttactcgcatccgctcaaagagtcttccgtaaatggcacttcctgattcgggactcgagcgacttacaggctgccctgttttttaagcccgtcaattatactctaccacgcgggacgccgggaattcgcaacccattgctagaagaatgtatatggccatggttttgcggaagacaagcgcacaagtggaaagcgccgctagtagagggaggggcgaagatacctcagatcgatcctcagagcgacgaagtctttctccgaaaaggcgcaagctggaaacgaatgttatttcagcagcctcctcgatcgtgtattggatttatagagaaggatggaaaggccgtgaatggtccggcatataccgaagtgaaagttcaaccgaggggtagccaaggctatttacgaatacgtgacgtggtactcccttgtacgaatatcttgaatgaagttcaccctctgctagatgaaggactactctggtacggatttattgctgaaaggcaactaccattgaatccttgggaagaggaatatcgaacagatagcgagaggtacggagaaatctcgaggagccaggtagcatatactacctcaatatatctgcgggactgtgacattgtgttttttattctagaatgtggatgcgttcgaggacaatgggttagcaatcatggtgctaggatgttacattttcggctctgtcgtatttggatgagtcttgtgcctgggcagatttctattccgatgccggtgacctagatttctaaggatatgtacgttaaatgaagtggcgaaacaagatgttcattgaaaaccaaagcaatacatatttttagctaaaaatggtactcattccaaccggttcgctatagagatatcctcaccggcagagctaatgaatggataatcgtgggaggtatgctcatgggtatgtagtggccggaccatataattaggccttgataagtgctgcagcacctggggaattttggtactgttgtccgtattgaatgataatgttaagacatataaggctgttagattggacagttgatgtgtaagtagactacatgaattggatgattgagttgattaagttgcttagttataatatatttctcgttattatcctttttatatatctagtgcagtggggaaagtcgggatgcctagtttagtggccttgtccttcaggcagagaaaacgaaagcctggttgtcaagtagagtttcggggagcaagtagtctagacggatcatcaccccaagaatgaaaaacgagttgcgagatgtttgtgtactaggagattatatgctatggtgtggtctatgtgatccctatgcttgctagctgaccccccgggatggttggtgttgttgtgtcgtcctcgtcttgcctgcatggccaggctgcccatcgtgcatttccctcttcactatctgctttccactttgcaacttgcttcttcttcctccctatcttagttattctgaattaatgcactcttcaagttctatctttgcaagacctggcacgtcacaattccagcccacttcttagcagatgaaacatctccgacgggtgaagcaatagaggccgtgtcttnnnnnnnnnnnnnnnnnnnnnnnnnnnnnnnnnnnnnnnnnnnnnnnnnnnnnnnnnnnnnnnnnnnnnnnnnnnnnnnnnnnnnnnnnnnnnnnnnnnnnnnnnnnnnnnnnnnnnnnnnnnnnnnnnnnnnnnnnnnnnnnnnnnnnnnnnnnnnnnnnnnnnnnnnnnnnnnnnnnnnnnnnnnnnnnnnnnnnnnnnnnnnnnnnnnnnnnnnnnnnnnnnnnnnnnnnnnnnnnnnnnnnnnnnnnnnnnnnnnnnnnnnnnnnnnncgggagcgcttttagttatgtcacatagccgcttagtcatcctgctctggaaaccactgcagtaaataagtaaaccgcggcgtagccactaagccggctgcaggccattaagcaagtaagtaagtaaataagcagataagcagataagcctacccctaccgcctaaaggctcatatagagtatataacctacactactccatacagtaggtcacattaggacagactttggttcgtccacgctcagcaaactataacccgtatgcgtcaccaccccgagtggtcgcttacgggtagctggtacctctttaatactcccctagctttaaagttatagtatctctaaccccttatttataggaccatacttcttccctttttattgagccttggtttagtactgcagtgttacaatcgctatgtttgtatggtttgcatgtttgttatttgcagcgttacagagtgccggctatataagcaggccctctcccacttctgcacttgcttcttctctcttccttatcttagttatcttcgtcggaatacactcttctgttgtatatgcactctttctttattgatcgacctggaacgtcacatgcagcactagtgctgtaggctggagaagcgcctgcatagtcatacataactagttagactgcaacaggttgattgaactttgattgattgattgagataacgccgagtgtatgatcgtatcactactactctgtcataaggacatcctcaccagccgagctactgaattgacggtcgtgggaggtaggcttacgggaatgctctggagatttttttgacagatcagtcagttccggtggctgtcttgcaaaatatgtgatagtatcgtctagccagattagtcaatatttattctgccagctggattattctgccaaagttagccgatgacatttcaccgcattgattcagagaaaacaaccgtcacgtgacatatacacgaggttacgaagctccgcaattacaagtatgaggtgtaagacgtatgaatcacttattctttactcggcaaaaaattacttttgtcgtagtggtctgatccgtcgcccatactgggctcactgtacaatgtacatacctttggtgcagtccatcacccgccgcaccccacaaggctgatgagccgaaaccttatcgaactagtctaggtccacgggtaaatactaaactcccgtctttctttcttctcacaatctcctctcatcttacatctcatagcaccatcacttggttcatcgcagcaataccatcaaccacactctcgccacaccactaccagctcttcagccacgctcgatcaaccccattattaccaggatgagctggagcacggaaggtgcggagggtgcggagggtacagagggtaccgtcagcgaaagtatcattgccacagatattgtgcttaaagagcatcataagctcttcttcaagctcaaaacctcggcgagaaagttcctgggcaaccatatcgaccgacatgagctcaaggaaacaaccgacaaactagaggataagagcaaacaatataagagcgtccaaatctcagaaataaacgtgaagaatgtagaacagtggctctatcttcaattcgatagccatgatatggagatgaaggacgtatagtcgctccccctctccccctaccttagtacgtaatccaagatatagagaagagggggaagctggctaattgaatatagtgaccacaatgggtcctattgagaaggcttttagccaatctagaactactgaagctagtgctcggtgggttattgactctattattcttaacgcctatacgactgccactttaaatatcaaaaatgcgcagccgttgaatatccaatacgagagggattataatttttggcccagttaccattaaacgaaagagggcgattctctctaggagaccaggctatagagtctggtattgtgacgatctgagaggatcgtacttgcccaacggggcaggagcggtcacgtcctcgtacttgcctgtcaggaccccagtactaagaaggctgatgcctgaggtattgtacctgtcagggtgcgtggggaactgtggactgcgcaggagccatatgtgctgcctacgcagcccccttcttatcatgtgacccacaacctatatattatcctcgcatactgcttctcaggagaagcagctattagttctctaatataccactacgtatactcttgtctctatttcccgatcctccattatatacagtattcccttaggcattccatacctaggggtctcacagttctaatagctcttaaatactcggattgcctgatagagactacccctcgttcataccagttcgtatcatatcgaacctttgtaatacaaggtcgcagggactccctataataccgcagcctaacgaataggcttcgaccgattaaacccttcctcccgctataaataatcctcctacagatacctcggagttgacgtaggaaactactatactactagacctaacgctagcgcagcaccctacgaacccctctttattaacccttaattaactaaggaaacgcgttaaagaagctaaggtaagagaggaatactaaaacctccttgtagaattagaaatcctagagtaagcgaagcctcctactctaataagtataaatgactgtattatactataggttattaaaaaatactatatttgtatactaagagagcctataaacgttaaaccattctatagaaatataatctaggaatactatacctttattaaccaatttcagtcgcactttaataagtactagtaatagtataacttcggcctatataaggtagaggctgtagtcgaataactagataactagagaaataataattagcagtcttatataaagatatttaaagagcctgctatctaataagacttctaagacttctacctatatcttataaataatccttaaaatatctaccgagatagtatactagagtacagtactctatagtagaagtaatattaatctatacagatatttataatacagcttaatactatctatcgttatctaaagcacctatacagtcaacagtaccggaaggagcacctctaggctaaagtaatcgatacagtttatactaagtcgttaaaatagcctatagagctagaaacgtataaagcatatatcggacacctttctataatagaaagttaaatccctaactagcagaaatcgctttatatatagaaagagaaaagcgctagtagcggtaagaataacactactaaatcagatctaagcccagatactagtcttagctctcataccttatttacattaggaacaaagaaacgtaaggataggtttaaaaccaaaggtaaggataagtagggcaataaatctaataagaagcgtaagtataataaataaaaaataaatcccaatagtatcccctatagtaactactttaagtatagaaagccaggccactacatagatacctataaagagaccaaaggggattcacaatcaaaaaactgattgccctagcgctcatagtatcggcagcattagggcttaacggtatcaagcaactaggttaaacagcaccttctatatacagacgcaggcctcccaaaacccatcatggctatagacagccatatagtccactcctatagctcctataagctaaatagtaagctataagatagcaggggtgtggtataccaatatatactctcctataaagcagttaaaataacaggctataacctaatcattagattcaattagctagaagctgttaatcctaatattaactagaaaaactaggtatagtattatcgcctatctagtaagaagattaagaagataactatagcagcctttatataagagattctctacagggcccttatacttacagtatatccttatctaattacaaaaggtaagcctatcccactcttcgctatagtaaagggtacagagaaagctttacctatctaatatttagactaggctaatatctttaatcctaaagaagtaggaaagttactaaagagtaataagtataactatactattaagatagaagtaggcaaataaattccctataagccaatctaccctctttctaagatagaacttacagtactctaagattatatcaaagaatatattaagaagggctagatcaggctattacagagcctaataggtatacccattttatttatactaaagaaggacagaaaattatatctatatatagactaccagggacttaatatattaactcttaaaaactaatatcccctactattaattagtaagactatagattagctatctagtataaagatctttatataacttaatttaaaagatatataccatnnnnnnnnnnnnnnnnnnnnnnnnnnnnnnnnnnnnnnnnnnnnnnnnnnnnnnnnnnnnnnnnnnnnnnnnnnnnnnnnnnnnnnnnnnnnnnnnnnnnnnnnnnnnnnnnnnnnnnnnnnnnnnnnnnnnnnnnnnnnnnnnnnnnnnnnnnnnnnnnnnnnnnnnnnnnnnnnnnnnnnnnnnnnnnnnnnnnnnnnnnnnnnnnnnnnnnnnnnnnnnnnnnnnnnnnnnnnnnnnnnnnnnnnnnnnnnnnnnnnnnnnnnnnnnnnnnnnnnnnnnnnnnnnnnnnnnnnnnnnnnnnnnnnnnnnnnnnnnnnnnnnnnnnnnnnnnnnnnnnnnnnnnnnnnnnnnnnnnnnnnnnnnnnnnnnnnnnnnnnnnnnnnnnnnnnnnnnnnnnnnnnnnnnnnnnnnnnnnnnnnnnnnnnnnnnnnnnnnnnnnnnnnnnnnnnnnnnnnnnnnnnnnnnnnnnnnnnnnnnnnnnnnnnnnnnnnnnnnnnnnnnnnnnnnnnnnnnnnnnnnnnnnnnnnnnnnnnnnnnnnnnnnnnnnnnnnnnnnnnnnnnnnnnnnnnnnnnnnnnnnnnnnnnnnnnnnnnnnnnnnnnnnnnnnnnnnnnnnnnnnnnnnnnnnnnnnnnnnnnnnnnnnnnnnnnnnnnnnnnnnnnnnnnnnnnnnnnnnnnnnnnnnnnnnnnnnnnnnnnnnnnnnnnnnnnnnnnnnnnnnnnnnnnnnnnnnnnnnnnnnnnnnnnnnnnnnnnnnnnnnnnnnnnnnnnnnnnnnnnnnnnnnnnnnnnnnnnnnnnnnnnnnnnnnnnnnnnnnnnnnnnnnnnnnnnnnnnnnnnnnnnnnnnnnnnnnnnnnnnnnnnnnnnnnnnnnnnnnnnnnnnnnnnnnnnnnnnnnnnnnnnnnnnnnnnnnnnnnnnnnnnnnnnnnnnnnnnnnnnnnnnnnnnnnnnnnnnnnnnnnnnnnnnnnnnnnnnnnnnnnnnnnnnnnnnnnnnnnnnnnnnnnnnnnnnnnnnnnnnnnnnnnnnnnnnnnnnnnnnnnnnnnnnnnnnnnnnnnnnnnnnnnnnnnnnnnnnnnnnnnnnnnnnnnnnnnnnnnnnnnnnnnnnnnnnnnnnnnnnnnnnnnnnnnnnnnnnnnnnnnnnnnnnnnnnnnnnnnnnnnnnnnnnnnnnnnnnnnnnnnnnnnnnnnnnnnnnnnnnnnnnnnnnnnnnnnnnnnnnnnnnnnnnnnnnnnnnnnnnnnnnnnnnnnnnnnnnnnnnnnnnnnnnnnnnnnnnnnnnnnnnnnnnnnnnnnnnnnnnnnnnnnnnnnnnnnnnnnnnnnnnnnnnnnnnnnnnnnnnnnnnnnnnnnnnnnnnnnnnnnnnnnnnnnnnnnnnnnnnnnnnnnnnnnnnnnnnnnnnnnnnnnnnnnnnnnnnnnnnnnnnnnnnnnnnnnnnnnnnnnnnnnnnnnnnnnnnnnnnnnnnnnnnnnnnnnnnnnnnnnnnnnnnnnnnnnnnnnnnnnnnnnnnnnnnnnnnnnnnnnnnnnnnnnnnnnnnnnnnnnnnnnnnnnnnnnnnnnnnnnnnnnnnnnnnnnnnnnnnnnnnnnnnnnnnnnnnnnnnnnnnnnnnnnnnnnnnnnnnnnnnnnnnnnnnnnnnnnnnnnnnnnnnnnnnnnnnnnnnnnnnnnnnnnnnnnnnnnnnnnnnnnnnnnnnnnnnnnnnnnnnnnnnnnnnnnnnnnnnnnnnnnnnnnnnnnnnnnnnnnnnnnnnnnnnnnnnnnnnnnnnnnnnnnnnnnnnnnnnnnnnnnnnnnnnnnnnnnnnnnnnnnnnnnnnnnnnnnnnnnnnnnnnnnnnnnnnnnnnnnnnnnnnnnnnnnnnnnnnnnnnnnnnnnnnnnnnnnnnnnnnnnnnnnnnnnnnnnnnnnnnnnnnnnnnnnnnnnnnnnnnnnnnnnnnnnnnnnnnnnnnnnnnnnnnnnnnnnnnnnnnnnnnnnnnnnnttacaaaggctggttgaaaattgcggccagcgggagacttacctaaagtagtatggtgggcaacgtgacggtagcaattttcgtgtgtcggtagcatttctctataatagaatagtaagatatataatatagtacttactagtcctaatagatatatttataaagtataccctttatcttccttatataaaagaaattaatatacctaagttagtagatttattatataaacgtataatcctaatcttcggtatactagagaacctagtaagcgatagaggcagcctttttactagctagttttagttaaccttctactttctccttatagttaaacgctagttatctactatattctacccctaaactaatagatagactgaatattaaaactaggtactagagtacttcctataatcgtatattaactaggaataagataactaggtatactagctccctattgcagtatttatatataatataataacttacagtatgaccggaaagtcactgtataaagtattaataggatataatctatctatctaagatagcgttaaagagtaccctaaagagtactatatagatactatatagagggtataagaaatctaagaaataaggagctttataaaagagcgacttactaaggtaaaagagtcgataaagtactatatagataaatattatatagataaatcctttaaggttagtaattaggttnnnnnnnnnnnnnnnnnnnnnnnnnnnnnnnnnnnnnnnnnnnnnnnnnnnnnnnnnnnnnnnnnnnnnnnnnnnnnnnnnnnnnnnnnnnnnnnnnnnnnnnnnnnnnnnnnnnnnnnnnnnnnnnnnnnnnnnnnnnnnnnnnnnnnnnnnnnnnnnnnnnnnnnnnnnnnnnnnnnnnnnnnnnnnnnnnnnnnnnnnnnnnnnnnnnnnnnnnnnnnnnnnnnnnnnnnnnnnnnnnnnnnnnnnnnnnnnnnnnnnnnnnnnnnnnnnnnnnnnnnnnnnnnnnnnnnnnnnnnnnnnnnnnnnnnnngaatatatacctaaaatataagaagctttaattatagattaaaatttagtactatatttcctatacttatatataggtataggcagggtcgttatatctaactagacttaaatactaatagaatagtattaaaaacgcgatagagtagtaaaatagactctgtacttaaggtatcctaggaagtagggactaagtttatagggataaataaagtatcgctaggtatacctatattaggaaccgcactttcctctataatactagtagaagtattaaagaattccttagctttagagatttcccctatattctctacgattcctagggccctaataactttagtaactactataacctctatagcttctataatagtagcggcctttttagccttattagctgtataggttaagcgcttaacgttctgctcgataatatatacttagggtatatgagtatatataggcaatatattaagagcggtataggtagtagactaaacctcagaaggaagctatactattattaataataaattccttcctataataatatagttaaaaaacttatagggatataactatactttatagaagagtagtaagtatatttagtataatctataagggtcttatacttatagtctaagtagctttataactagaaaaagtactattagtaaggtaatagccttttaataagcttagagatttctaaatatagaggtagagttataggcttataacctattaaaagataatattatatttataaatatagagatttattctctttaaaagaagatagtttaggataataatatactattactattctataaatataattaatatataaatataaaaataaggctattttctataaaaaaaggatagatataatattaaaatttcttagtatactatataaaatataatactactaaatctaaagatatatctactatatttactaactaatagtaataccttaattagaataatattatcttaatagaagtataataaaaatttaatagaaatataaattagatatatttactaagtaagtaagataagggattaaagaaaagaagaagatattagaaataaacctaagtatatatatatataatatttccctttatcctaactatattctcttactaataaataattatttagttatacctttatatataggaaatacctaagtttataggctaactaagatactatatttattagagactatagctatctaatctcttagtatagttatataactatactattaccttattatatatactataccctttattatactataccctatattttagagtattaatattagatacctttccctatatacctttttacctttattataaggtttttagatatataggttttaatagactaagctactcccttattttcnnnnnnnnnnnnnnnnnnnnnnnnnnnnnnnnnnnnnnnnnnnnnnnnnnnnnnnnnnnnnnnnnnnnnnnnnnnnnnnnnnnnnnnnnnnnnnnnnnnnnnnnnnnnnnnnnnnnnnnnnnnnnnnnnnnnnnnnnnnnnnnnnnnnnnnnnnnnnnncttgccgcaggaacgactatgccctcgtaccttcccaaaagaacgaacgagaattaagcgagataaacgcaagagtataagaagggaagaacacgcacttagatagtttctctttttcctttcttccttgtacttagaatttggttggaattgcactcttttcctttgaattgaattggctcgtaatataattctaagtactaaaccaactcaacctttagactgtacagctgtataagcggtcattacgaccagttctagcttagtctaaccttttaaaaaaaaatttttttcccttttttcgattataaatatagctcccttaacgagaagctcggtgagctgtggaaagcgacctcttgaagccctatataaagaggatctcgactagctaggcctagctaccctaactcctagcgcctcgacctcgaaccctactataatagaaagtattgagtataatgagataacgaaccttaaagaagaaaatttgatatataatatactctaaggaaccttaaaggaagaacagtttataaccctcgctagttaatataaggacactgtaaaagaaaactaaaaactgattatagaaattgctactctctatactaaggaagcagagacaataaccttaatctagaacttgactcttaaatgcgatgaggtaattgcttacctaaaccttatactataagaaagagactgttatacctactatctcttaaataatgaacctacgacttaaggaacccccttatactctggtataccgattataggagttagaaaaaaccactaagatacctaatgtacctatccttaaggatagaaaggaggtatgattcgaaacttaggaaataattatttagtagaaacttaaggctaatactaactattaccctctccctatctactaaaagatctatatttagagctactataaaggtaaggcctaactctatattatactataaataagtgtagccttaagtaacctataccttaatatttagagccgctgtaaaggtaaggcctaactctatattatactattataaggtagcagacggcaaacgggcttccagatatggccgcaactgcggccgttttaggccgtagatttgccaagcttcgcgccacgcactacttcctctgaccacggccacgcaatctccgcttggcgcagcaacagacacccctcagttttctagcgttccctgagggtgtagcgcctgcatctttggtctccacacttggtactcaggctgcggttttcattcaggtcaacgctgtgtccctcttttctcccaggagccttttccaccatgacacggaaacgctgcgctcagtggaagggctcattatattggggccttcccctgggggtcttgtcggaattttgatatttaatactcaatctgaaagagtttgcctaccttcctatttctttcctggctttccttcatcaagagtaattaccctcaactcctcactggacgattgctcgttcccacagcatggctcgttcccggcgaaaggccaactcatatccgtatgacgatggccatctcagctccgacggctccgacagctcagatgatactggcgatggtcaatatgacacggatcctacagagcctgattgcgaagacgatcagctgaaggatgccagcgatgttgcgcagctctttgcagacaacgagcatttgccagaatactatgtgcagcaacttgagcagtttgacgagtccgtttacacccaggaggattacagcaaaggcactgtatctctccttgaccaagttcatacaagatggaatcagtgagttccagcccttcgttgggaagtctagtacatctgatctttcaatacactatgactaattaaacgcgtcttaggttctgtgcatgtgttcaaaaagaccctcagcaagagttttcgaagttatccgttggtattttgtatacctttttggattgggtattgaatttgcgacgaggtaaaaatggaagacgactacccggaatcaagcggaagagctcgctggaaactttttggaaggtttttcggcttgtttttgaaagagccacatctggcaagattgaaaatcgcatgaatcgacagatgcgccgtgtaagaatccctcttttgccgaatcaaaacaccgttgtccttccaaagacgctttaagtccgcaccgtatagttggcattaaccactcttctaggtcatccgaaaattatcccgaaatcataagttatctcgtaagggccgtgaaaagtccaccatgtacgtggaggacttgacaatggtcgtcgagaccgcgatcagtactacaaaaaagaaatttggacatgggaggcatcgtatcgagctctgcctcttcttgcaacttgctggcctcactgcaaatcgtcctcaggccatattgaatttgatgtaccgtcatattcgagtcagcctgctccgagatccgcaaggtggcccacatagaatcgtgattgagttcaccttcgagttcacaaaagggttccttggcacgaaagacgagtgagtggatatatcaaggacttactatggtcttcagatagttaaccagcatgcaggaacacctatatccttcctgagatcatttttgacccatcgcttgttctcagtccacatgtctctttgctgggcttgctctttggggatcgtgctttcaaacgggtcgagggacaggaggttttgttctctgcagatcagcttcctcgtctaaatattccggcagattgtaatgaacttccattactgctcgatccgtctttagacgatgttccagtattccgacaaacagaacggtcattgcaaggaatgagaatctcccccgacaagcctctaccatactctacactgctcccgtgggttaaaaccattggagtcatcactggatttcgacaagttgctcgcccctacagcttgcgatatggcgctgccaaagcgttggataatagcggtaactcaccttgcatatttatatatcgtgcgcattcacaacttgctaatcatggcttcttttaatttaggttccgtgagcgactctcttcgtaatttgattatgcaccatgccgatactcgcacctttctaaagtactaccttgatagaaggattgataaaaacctacctgccttaattcgcggtctcaatccagacgaggatatcatgcatgcagcctgccggatgagcaggaccatcgatccaaaccggccgcaagacctgacaactgtgcaatcgtcctccgtcaaccaaaggccggaaatcctagcattggtccagcggcgtgacgagcttcgtcaaaaacttggtcgacccctctcgcggcatcgaggcactgtcaaacatgacgcttatagaaagctgaatcaagaaatcaacggcgcgagagaacgggccagaaatgcgttgctatcacagattcaggaaaaatatgaccaagagcaacctatgctagaagttcaacgacagttgtccgaggctacgcttgaaaaagaggtcaaaaccaaactggaacgatcagaggagcttcctctacctcaaaagcgtctgatcgaatgcctattgagtttgccacctccaacgttggaacaagagatgcgtcggcgaactgaagcaatcgatgctgtcgctgcttactgtcaatttgaggaaggggaaacgtgccgtctgccgcgaaacaaacgttttgagaatgatatgatcgagctagataatcctggcaataacccctcagaagatgaagcgtccgagaacatgtctcaaccagattctcctcttgaggctgctttccgatctatcatgaaggatcaccgacctctgttttgctttatttgtctaggacaaaaaaagctggatatgacgaagcgtgtgcagcaatttgcatcgcatggtgatgtttcgaagcatatcaagcgaaagcatcttcaaaaaattgcagctggcaccgtaatctcgtgcaatatatgtgatcaaaaatttgataaagttatgcattttcagcgccatgcaatcgattttcactcgactgtgacggggtcagtggcctccaatcatcaatgaatgacttctttccttggctttgtatgaaccaaaattgaatctagtgtctatgtcatatgcaagctatagctgtaaagttcaaggattggaggtctattggtagtaagcatcagcatgaacgaaaaagctgccttgggaacaaaaggaggcttgagtgctatctagctaattgtaattgcattagacaacatagcctcaatgacgtggcatttgagtctgtgatctgatagcgtgtcataaacataattagaatagatagttaagcgttgtatcttagcattaagggcagataactagaaaacaaaaggttcatacttcaccagaaagccctcgagtctcaatcatactctgatagagagcatgtctaagttctgcgctcaaaaacgtaagtgcacgctgcgatgacttcggaattttcacgtaattgaccaagcagttgaatttgttgggcttgaatggcttaagcttgagattgttttatggctatatctctacgttccacaactgtcgaatgcatccattttcaaggtaagtcctcacttaaatctgaaaaccaacggatcttaaccgcggcataaaagatccgtaagcatctgcttcggaacgagctccagtatgacgagcttcttttggcaatagagccgacaccacattttgatagctcgtcagaatctgccgcaactctcttctttcacaatatcggcacaaaggtcatccaaggttacctagagccatctctatctatggtgcccattcgggttcttctctccgggcatctagacaagcgtcgagaagggatcgtaaacctcaccaggagtgtgaaagaatgctcaaatagggaaagtgacaatctaacgctcgcccacttccaggaacatacaccatacaaaccatggaaccaagaacagcaattacgcaccaaggatgaaatgttccatcaaagttactcgcaccttgctataaagcagatttatgaggatcataaatatacaagtgcactgaaagagataggagattccgagtgctgttcaccggaatacagtttgattcgactggggtttgatcctccaaggtggtgtgctgtggctcaatatagaggagtcaaatcatctgcagaaggaagttctaaaagagcagcaaaacactcagcctccaaatcactttggctgcaaatggggggtgagccgatcgcttagttaaaatatctatacgacaaacccttaaaattgctttggttcttgggctgcctaggtctactggggtttgaaggaagaactgcccttgaagatattcattcaatcgctaatttgactggcttttaccttttccttattgtatctcggaacaaggcaaatgaagtcctgaccgtgagaagaattcacagagatccagagagattgctcaagatagagtagtttagttcgggtcgcttctgcatcagagctgcgaagcgggggcaccgcacaaggagtctcgatcgcgatgcggcataatcaaccaccaatgtgtataaatcatcagccttatctagtccactgatcaagaacaaaagcttgactacaccttcaattcgacaagaatccaagatcatgtgctcaagaacatgaactagcttccacaaagtcaaacggtcaagtgtgtccatgccgtgcttttttgcgaatatatgcagtcgtgcatgtgtaagtaatgcatcaatgttttggcaaatgttttctgtttccctgcaaattggctggatgggtgtttgcgggaagttttctgccagatggtccaaaagctgctgagtactcgcacgggtccgaaaatagttattcttgagcactagaaccttctcgaatgcgacttgagttctatcttcacaagctatatgagccgagtcatcctccaagactgaaatttgatagtccccgacataaagatattgaagtacatagctgaaaatatcctctatgtcatcatggaatccaatggcgtatttagaaaggtcaagtggagagcaaacgcgtgcgatacgtttattgaggacgctggcatgggcactaaattctttttcatttggtcccactttgaaatacacgatcggggaatcaaggtcactaaggaaacatcagcgcaatgcatttcaacatgggaggtgggggctatgagaactcaccctggatgcggtagaagcatgattgatggggaagaaggtcggcaatcgaaatcggggaaaatttgtggcttttaaatagctggccagccctcaatgaggagggactgaccctcagtgagggttggcaattgtaaaattcttgctggcctcagtgaggacaaacgacggaaaggagtgtttcaatgctttaccagaaacgggcttctgaggtgtctgtggttacttgcaaagtactgtgaaatacagtggtattcgaaatctttttacctgcaatctctctaaacctgatgacgaatatcactgtaagtcctcttgacaagagccagatacttcagctgcattgtgcgctccatgatggtaatttcactcgaatatgacagagcttctgattgtcgatacatatcacaatgatctttgggacatgacggtgatatctgtagcttttctcattggtttttgtcgaggtaaatgtgtacaattatattgcttattgggagaaacgaggagcaagccagtttacaatcggacaagcatctaagcttcctagtaaaaaagactgattacagggcttgggggcccagagacagtgaaggctctgtggtactattctgatggcccgagaggatcgaagcccctgttcagcatatgtttgttgtcagaaggccaccaaggctgttagattagagactcaaatctcaggcgattataagaaacatacttgaaggctgatgacatgtaacctgaaatgaaagtctgctcatataagactacgtactagggctcggtgacaccgacccgagggcggtggacacagatccagagacccagtagattccaagaccgcggtctcaagacctaccaggccattagaatgccaacctatatcccctacaatttcacgacccgctaagccataagtctcagagcttaatacacctagtgactcaagactagctcgaaacctgactacgttattctatcgtcagaatcagttgccgcccttcgctgagcgtccgttttcatcatctcggccaccgcagccactttggctcgtgtcactacaagatcttgttgtaggctcatgaggacggtattcgatccatcatccatcgcggctcggacacattgagcagcgctgacaagtcgtaggttcttgttgtagaagcgtgcatgtttgttgtccttgcgggcatacttgtgagctatacgatgtgcttccgatggatcatttgggttgaccggcacttggtccgtcacgtgccatcccccattctcataagctttgaaagtaatcgtgattgcgttgggtggagggttccgacgtgggcggagcgcttccggcagaagtggaactgtgaactcgcttatgttttggcctgaggcgggagcctcttgcgagtcattcttattttcgcgcagcttctttttgttcgccttttgaacatgctctttgggttcctgaggcttaggaacttgtgatgccatatcatgatgggttgtttggccatctgcatgttctccttggttgagcccgccatctcccgtggcccctgctgaattttgaagcgctgcgggtcgaggtgggccagtatattcacctatgatcggacctgaggccgaaggctcaagcaaatcgcccagaaactcgcgaggtcccatgttgtccgtgccctgttcagggtccgaggatctctggtgaccaaaaggcgttaaactcgtggcctgaccgaggatgggcgactcagcctgctcttgccggtcgatttcatcctctcccacaaccattgctgcatccagcccaattaagtcaatttgagtaatggcctttgctgctcgggtgcttcgtgccactcgaccttgccgaacaatcgggtcaggatcctgagttgtggctggcgaattttcattcgatatgcgagatgcggataatgcgtccacagccggtcccacaccagggctgggaagctctaatgaagcggttggctcattcgtcgacggagaagactgcttttctgatctttttccactagtaagcgcccgtgtctctgcttcctgctcaagctcctgaagggcttgatgtattgcatcttgcgcactctcattttcctcggttatttgattcaggctttcgctttccgcctcgacagggctcggcgtgggttgtagatctatttcagaagaacttcctcttgccaaccggtcttgcatcttagcagacacgacagactccacatatgccattgagacgttctcgccgcttcgtgaagagtcttgggaatattgcgaggcggtattttcgttcatatctgtttgtcgctccgcagtatcatgtccatttagatttttacttgatggttcgtgtctagtgtcttccaagtagcgccttgtgccactgccttgaggcagcacttgctcgtcttgcttggaatttggcaatatctctgggtcctcctcaacgtctcttctggtatcgtggagtaaatcgttctgtatcgctaaatgatcatccccaccaatgcgactctcagtataggatcctgccatggaaatttcttcactaccaggaatgacatgagcgaggtcaacgtcattcatatccatatcatgatcaacagtggtggagtcaactgaatcagccggcacggctggatgcaagtcggcaatttcctgtcgtcggtctcggtgtaaatggcttccagcctcctgccttcgatggtgtagttctcggcggtgttctcgacgtgattgtctttgtggagctgatcctgtagccgagaccgctcgtggggtgcttggcaggtcattgactggtacaaacagaggggatctagaaacttccgtttgcagcagctcaggcgaagctataccatggtcttggcgttgcgcccatgtcaaaggcttgtcgaagaaagcaaaatacacgctctgtctgacaaaaaaggaggagataatctgctgccctgttgcttctttggaatgcactttgtctaggaaaaggtgaggtcgatctatcggctgcacatgctgcaatgggggaccacaacgaagggcaagcgttggtgcccgaccaagaacaagctctggagagggcgtagactcgtgagcgactgcggtaccaaaacactccactaatcggtcaatcagtgaatcgaatgtgatagggtcatatcgatagctacccggtttccgggccttgagtagagcttcgcgagcaattcgtcggtcgggggaacagctcaacattttagtgatgggcaaagagtcgaatcccaatttctgtgcgagcgtagccatgttgtggagaactacttcatccgctcttccgcggatggccttggcaatgactttcttgctggtagcctccttagccatttccgggtaatgacgcatagcaaataaccagatttgtcgataggcgagttcaaaagaatccatacttgggcctgtgtggttccgaaagcgcgcctccgatgtctgcacaagacatgtacccctggtcatgtcagggttataaacatgcttcaaggcggctcgcaccgttggctcgttcttgcttataacagcaagttgccgcacaccggttgcgcacgcctcgagatatgcagtatcgcggaaaaaggtgtgaattgaagggatgatcccatcataagtggacattcgattccatattccagatcgttcagtctcaccaaactgggggaagacttcgccgctgagtatatagccttttacttctctcgcatccgcaaaacatgccaccggggctctgagctgaagcttttccacggtatgaatgtcgattttggccatttgatgtcgatcactatccactatagtcgaccagaatctttcaacatgttttaaataatggataaattccttcgtcgttagcaagaattaggtgaaagctgtgggaggcgatgataactaacttcatcgcacttcaatgctagtacacgattgagagagccaatactcaggccattccacagacctggaatgggcaatagggcatcgaaggcagcgcaaatgtcgacgttgtcaggtgacatcagttgtcgcaaacgcttagctttattttctgaaagccgcgcccaccaccgcttctgaaacggtgcattatgctcgttttggtattgccgaattttgcggtatatatttccatcagtgggtgttttctcgtttgcatattcatcgactagtgtatttcgtaactcagtgctaatgtctacataaagtcagaccgagagatttaaagaggaaggctgtaaagtagaagttgtgccaaataaaaaaaatctcaccatctagatagaggtccaccgtccaccattgctcactaggagcaaggacttctgctgctgcacgcaggcggtgttgaccatgaaggcattggatttggctagaggggaaagacaggaacgggtatttatcaggcagactagttagcaattcctccgcggttatttgtgcctcccgacgggcgtgcttcaagtgtcggcgggttacaacagctgtcacatgatgttgtacatccagtcgattgcagccatccttccgaaagacttcgcataatctctccacgttcttttggtccagttgtcgagccacgcctgggtgacatgttatctggctcagagttatcttggcagttccttggtacttcaggcgccgctcagttgtcagttgtagctccgcatccgtgaacatggattgttccatctcttaatccctcgataagtcttcgtcaaaacgtggattgagaaccggccaccagagcgcttttaagttcttaggttgttaaatggccattggaaatggcagggctcgctgcggatggcctcgttgtggatggaagctcgaaggtgccctacaaaaacagtgctactgctgtccccacggtatccaatttcttttcctcaagtatcttttagagactatattcaaacatggaaagagatcaagacaagcggtctactcggtttgatatgctgcaagcccaggcgcatttctcttcgtcggtcacggcagcagaaacgcagcctcataatcctactaaccagccaggccatgctcaaagcccaatcaaataccaaaagagtcctgcagctcagaaagatcgttctcgcaagactctggaaggtccgccaaaaacactggagcttcccaccaatgtcagtaccggagggttggcgaagactctacttatacgaacttgttccccgtgggagacctataaacccatatttacatgtgatcttgccggtatagtatcaattagtgaacaccgtcaccggggctccaaagtagtcgccatacgaagttcgtcaagaatggatagagaggatctactccacaaatatacgcgcttcgatcacatcaacataatttctgccagtgaatgtttcaaggacaatggcgtaaaccattatattgtcgatgacctaccaatcaccttagagcacctggtcgccagcgatgcctatcccagtgaggttcagctggcttccattctcaaacaagtgagtcttaatactgtctttttccaaaggacggtcttgctaatatgagaaaggtcatagacggattgtcttatctgattgaatgcggctatgagcattcgtctttaaagtgctccactacactaatgagtctagacggagtggtgaaaattggtattttacttgacacttcagaatggctggtgaaagactgactgtcgtgatagctagcttggaacaaactgtgccctacacgtcggaacgatcccaatctttgtccctgaaaagcttgggatctctaacaatggaacttatgcagaagtatgtgaaagagaatgtggggatagatgatccagctcggtggcccgtcgattcgaatgcggttgactttctatcgtcgacaacgtcagcaaggtctgtgaaggagcttacaaaggtaagcagtggcaatacccttactgaatcataaacttacagccttcagcatccactcattgcagcatcctgttccaccggcagcttggttgggctagcgcgacttgccattgtctctgcatgcactttttattcctacagagagtgaattttggagatttatttgatcgtatgttctcatttgatgatatttgaatctaattctcttttattcttgtacatataagaaaagaattgtttgatcgacaggtaaccgataaccgtttacatgtaccttgacctgcatgatcatatgatgatttgtagaccatattatcgacttaaacggccttgatctagtcgcaatattatagctcggcggcctgattgatggaaagaaatttctcgagccttaagccaggctcgatgagaaacaacgaaagatcgctcattttgaccaattgacctagacatgagtggtatgtactactaaccagtagagatacattatattcacttccgaattgactcggattcctcggtatctgtaggcatccacttgcatacctccttttgataattcatccctatttgacattcggtggattcactgtaatatgtaccatttgatttccaattatttgcctctttcatgcttattatagaataagatgacttataattgaagctttggctcttcggctatgagaattagttgtaatttccactcaattccggttgtgtccttcgggtagtcggcagtatcggtgttcattgatcggcgtttatcttcggcctctgagaatactaaaggcacccgattcggcgagcatcgtcatgaaagtgatttcccggccggtagggtgaattcaattccttgatgattaggaatgggcctttgcaatccaaacatgaatcaggatggcgtcgagtcgttcgcacattttatgcccacgtgagtgactatctagcatgataaggattttccgtaagtcttcctactaactagcagtcgaggtggttctccataaatatgggaacaggagttgtttccattttactcaatacaccgccatacaatgggaaatggctatattacctatgtataatcgtatctgccctgaacgtggcatatcttgtcatgttcttagccatcagtttgctgcgctacaccctatatcccgagatggcccgtattgagccaagaccaatgagtgtacagagaatttggaccctgccctgggaactttgtgccattatggatcagagcctcgttcacccataatctaggtgcccaggactgagaagtacagtgtgacatagccaattcaaggcaaaggttttgtttccaattagtgagactaacttgaattgtccctcgtcttattgtttagtctcacgttttagccaacaatccgtgcctatggaatatgaaacacagtgctaaagtagaccactcgctgtgaccagagttgcacaacaaatatcttagcagaagttgtcatgttttccaatagcctccaacttgacattcatccgtgtcgccctttgagaatagtctttcagtgacttgttatagaataccaggtctcgatagctttggacccctgtctcggtttgtttcctaccggaggcatcaatttccacatcatcgtaacctttgcctctgaagttgggggagctcctaatggggcggatggctagaggtagagaactgctcatccaggtttgtatgtggacgcgatgtgtgctccatgcactacatagacaggacagagctcccagaagccagaccgcgactggaagcacgagccatctccaatggatcgcaacatatgtgatagtaaccatggttctccctgcggtagtgcctctggtgaattgactgcttgacaatggctcataactgacattgccggtaaatgctccatcacgaattgttttcgacatagcagaggcaacattcttgatagcgcaggtcagttgatcattttctgggcaatttgagtttgtgagatttttgtaaaatatggcttccagtgtgtctgttgctgcataggttcccacgccgtcacctgatctttcgaaagaaaaatggtcagagccagcaacaacgtagccattgaagaggtctgtcacgaagctctcaatggctctcattgcctcccaaccaataccgaagatttgagtcccattcattgcaaagttttcctgcaagtcgggtttcaacgtcaaagcgtagtcaccatccaaagttctgttgatagctgtccacttctccaatctttcttcctggtagactcccatattgaccgatgctttgaagctttggacaagtggctgtaaaacacattcagtggcaatgaacagggtgttgttccctatttctgttgagataccaccaccttcggtaggattttgattggagccggctgcaaagatatactgtatgaccgggaatatgctgctctgatgaacagtattcgagcttgcaagcactgtccttacaacgattggctgagcagcgccaccatctggtaagtaccataatgtaacgccgcttttaagcgatagagtgcaattgggatatggtaccccgaagtcactcgatgcgtcttttgactcaaagcaggtacttttcaattgcgaagtaatattggagcacgatgcacctatctccaagctcgccattgcatcccaggtgcagtttcctgtgggacaagtatgttgcggctttgaccagggcaatgtaggatctagattaaaaagagcactatagacgtttgccttcaggataggatcaacgtagaaggctagtatcttctgtcagcaccttgcaagatattgaagaagtctgaacttgaaacgtactgtcaccaccaagtaagggcccaaccgtattatatccccgtgtactagccagcagtgacacctgggaaggatcttcccggtaatgcggaacataatgaactaagttctggacaaatgggtcaaagccaatagagaatatcattgccaagctaccaattgcggcgaggtggctagaggcaaattgtcagcgtaaaccgattgcatcaggtagctgttgaataacatagaacaatattgctggcacataccgtcctttcactagccatagcaacgctacacttccacttaatcctctgctagctaggtcaaaggtatccagatcagacaaagttcggctctgcctggaaaaccagacccatttcatttgacctaggccgttgctgacagcgaatagcaagcaagccttggatagagtgctgagccaggcaacaagagaattcagcgatatatatttccagctcggttgttgccgcccgttgtactttctaagtacagtaacaattgaaatgatcaaagctgccgacacaaagattccagcagcttcccaggcccagtattcgagaaatgcgagagcagaccgcagctgaccttggttatgcttggtgggatgtagctcgtcctggtcgtcttcctgagcttcgaatatggcttgagcttcagttattggctctacctcagatttgaccggagccattggagaagaatcaggcctcattgggaggtaaagcaagacgtatccgcttcttccctgttgtctgttctccgttggttgttgaatgttgatattcacaaatttgagtctctgccttcattaaaaataaagaacggggttattgtaggatacccataataggggtggttgagaaaaatggggccaaaatggaggctaaaagggtgtgctatcgaacttagtaagcattaacccaagcgcagaacgttccgtctccggaggaaatatctctcaggtatccaacggaactaatctaaggggtgtcatgatctaattggatggctcaccccggctgctttggcttgtgaccaacaatcagccgtggctgatagggcacctgcattagcttgacatgcagtgcgacggtctcggtatttcgcatcacaaaagtaccaaacagaatggctagcttaatacgttaccatcctgtcgagacgatatgaatggagtgataggcatataaccctttaaataatccaccgtaggccgaaaacctcggctgggtttagtaagaggattcagttttcgacgtgaggccttaacacacaatattgtttcgtgatgaaaggccgcagaagcatagctatttcgattttggaatatatcgtgaactcaatcatgaattgatggtcattgtagcgataatctgtggataagccattctgggtgctaatgatccttaatcgaacagatggctcacgcggagcggaattggacttgtaataacttgccgcattccggaaagtacttgcatgtttagttgcattagtttcggagctagatcccatttagtccagtcccgatataagcaccatagaggcccataagcctcatgctgttcaccagctgagcgtacaggatggatcgaaatcagtttcaccatttacacacagactcgttctcaaaccctattccaaaacacgctaatctttatctgacttagctttgcttcgaaattcgaaatgtattgaaagtatagcacgtgataaaaggttttataaattacatgaaatggccttgccaaagatacttccgcctcgcagttccctccccccccctccccggttgaaccacttccgtcatccttgccattagcctcttgcaagggcagtttgtcacgataaaaagctctggcttgcacttgaattgcattgagtcaacctaccacacagaaatattctaggaaattacagcacatccagaaattgctgaaaaaaattcgttatatctaacaggcttcagaacagcgttcgtcagccaggagaatatacgaggctaaatctacctgattgtcccagatgcagtgaatttccccgtgaaatttgaaaacaattaaagaaggtgtggacactagatgcactgtgtttcaggttaggcagggtttactcactttgccaattataatattgttgagattagcagggctcttccgaatgtattagtcaatattatgtgacagctgaactcatcatgaacaacagtatcaattcaatgagaccgtccaaattgcagactgctgagaaacacgctccaaaacagagaaagcattgaaatcatgatggaaagcgggatagatgggttttgtaagtctgtgccaagtcgctggggtacaatccatgccaagaagaatactagcagtggtgaaacacagacgaaattgtagaaaatgatccaacgtaggcttatgatttcgcgcgcatagatcccccagaaatcttctcgcttgttgcccgcttcttcgagttcggttttcttctttgggaggaacttcaggatgtcagaggaatgtgctcccagccttctacattcatggtgcaagtgaagtagtggtcgtggtttatgacaggcgtagaaacgtgttgtgaattcgtgctctgagattggcggaatgtcgtccatcggtcttggttgatactcgtaatcggtattcgcatggtcagggaatgaatctttgattctgagcgcgaactcgtggtcatcgaacttgacaaactgcagattttatacttagaacccatcctgaagtacaaaataaaaacacttactttgtaaaagtcacaatgagagtacctccagacgctaaaccagcctcgtaagacacctcggaggcggaaatactccattttcatggtgctaaagaaggtatgacaggtcatattgctaacgcatatttgtgcaagtctataatctccacctttcttagcgagaaagaggacgcggtgcttagtggtgctcatatcggccttgagtcctgagggtggacaatgaagtgaagagttggagggtgcaccgctcggctgctggcctccatgatcttgacaggagatctgactggagattagactagtgttcagggcgctgcgagggttcgagtcaggtatagtatgtgcctctggaggaggctgcgtaatttgagtcgctaaggtattcacgggaaggctcctaattatggactggaggcgtttgacaagggtgtttggtacctccgcctatcgctcttcaccacatacctagataacgaattagggctggatctatgctgtgtaaagttgtctatagtttataaactcacacactcccaccgtaaccgtgtctctgattctgccagcggtctcagacagtgaggtaatggccaccaatcccaaggctctccagtccagcgctcaattaaatactgacagtggctcatgaacctgaaaaatcgagagctattttcgtcacgttcaaattgaatcccgcgggggctcacgtgctgcaattctgtagcaagattccgtagtttataccgagcagcatcggcatggttcttatgttctggatttgaccacctgctcaccagatcccgaaacctggagttcagcgagggttcaataaaatccacgagccgacgataaaggatttggtaggcggtactttccaaaataaaatgcttcatttgatccaaattttgcaaatttccctcatacgggtcatcctcaccagcttcctctgccacagagtcttggtcactttcctcatcatcaggatcaagtacctggattacttcacttgtttgaggagcaggtccgcttctgtgtagactttgaagataagactccacttttctctcgtctgctaggcgtttttcaacagatgttattccattttctgtcttgaaatcgtgaggtttgatgtttggctgatcgtcgataggtaccatagcaaagagctcgcgggtgatcatggccgaatatgagcttatgaatctccttaggtcttggtgcgattcgctgagaatctctgccttgaggttattcgcaaagtgtttcaataatctcctaaaattgtttcgcatcctctcaaatccgaccgagtcttttgatacgccgatcaaaagtaaggaaaagatgactccatcttcattcaacaagtttgcaaactcttggatcaacagcgaattcatctcttctcttgcggagtccaatgatctggtgctaggcatagacactggagcagaaaacactgagtcattctcaatggaggaatcggagtccaccgaacccacatgtctattgcgtacggcagcctctgaggagaagcctagagtatgaagatcctctagccctggcgtctgcctgcgagtctccaaaacctgcacctcaagccgctccgcctctacccaccggccctggttccggtacgtcgatgccagattggccatgcctgtcagcgtatcaggatggtccgcgccgagcttcatcttgcgagtctccaaaacctgcacctcgagccgctccgcctcttcacaccggccctggttccggtacgtcaatgccagattggccatgcctgtcagcgtatcaagatgatccgtgccaagcttcatcttgcgagtctccaaaacctgcacctcgagccgctccgcctcctcccaccgcccctcaagtcggtatgctattgccaacatggctaagctatcaagagcctcttcatgctctggacctagtaaaatcactctctgttctcttgattttgctgccatatcccttgtatttgcgacgctgccgctttgcgacgcataccatgcacctctataaagtagtgtggcccatttgaatagagagtctcgtgatttcggtcgttgggacatagctgaacgaacgtgaggaaagagcgaccggcatttcccccaattttcgtatggactaatagggaactcctggtacaaattgcttataaacctctccctccactggtctatttctccataggatttcaaccacgcgcgcgtagttaattgcactagcctgctcatcctgaatgaagtgctatttttgctgatagatataaatgaataatctctcagcattctgatatcatcttcaaattcagagtcagcatcatattcagatatcccgccatcgctagggtcgtcagggagctctggatcagagttatagctagccttaggttgatgccggataaggttctctggtatcccttgccgatcaaaaaagctcataagagaaagcaatcccgctgcagatggcttgctttggcgtatataatcgattgataattgccacgtgattagaatcgagtttttggcttcccaatctcgggaggagtgatctgcctcttgtatcaataacgctgttgctttgcggtcactgccctggaagtcttttaggtattttgataccgaacagcgaggtgcccgattttgtatatagctagcggcctgcacaatcgctaacggcatgagctccaacgcgttcactaactgttgaccttcttggctttcatctggctgatcgaggtttttttggagaagttctagcgcttcagactgttccataggtttaacctcgataaggtccttatggtcgactatcttcaacgccacctctttggtccgactcgtgataatcacagatccatttcggcttttaggaatatattcccatagtggttttgtcaaggtgtctgttcggctgtttttctgatcttcattctttgccactgaaaatgggcaaagaagttgattgtcatcgacattatcaaggattaatagccattttcctctcttgtcatccccgagccagttctcaaccagtccgaatatattaactttaggatcttgacaacctagaactttgacctggtttgcgatatccctgaaaccttgctcgaagcgggcttcgttgctcgcatgaacccaaaagacccatgttgctggcgactcgaaccgaacccggtagccgtattcgatggcaagttgcgatttccttgtcgttgtaagcaatgagtaataaatcacatactagtcgttttccactcacccgacacctccaaggccaaccagcgcgattctcgaccctggcaacgagcttttctcgtggatgcgatgaagtaggatgtcgcgactgacaaaattcggatcgcgagggaaagggatagttgatagagggctgggtggagtttccggtcgccctagattggatacagcgattagtcacagtcgcgagcttgtcccgctcccctgacttacctagaggccaatggaggaccgagtcgttgttatctccgatctggagtccattgtttttgccacggaatgatatcgatgccatagtcgaataaacgtgccttgattacgggataaagttcatgagaaggcttttagtctgctactcagctgaaggagtggtaccttaggttcgtcatcaggtgactctcgcggcgctaagagacgggaattgattggcagcaacccacgtagaacattcagtcgatcctgactagggtgaaattagcaccttccaggaacttgctcggcccgggcccgaacacccagatcaagtgcagcactcatcccgtcgcgtttttccccgttttaacggcacgaataaaaaaatacgagatcacgaacgaacgcgtgattgttcaacctgcaatcatattcatgaggtccgtagcttcgagatggccccccgagctcccaggaatctgtggaattgtcaagtcacgtgcatttcctaaaacctagcacccccggactttttacccaaaatcatttcatctgctcactgagcagaggggtgagcaaggggaaaagatggagtcgccccccactctttcttagtggccgaccactgccctgccaacgctctaccctttctactagacgcccggaagaccatacaaggctaatacggaagccgtttttgctgtaatttacaattgtacttgaatactgccaagaaacggagtcaggggtaaagcgaccataataggtatagcttttttcgaaaaagggtttgagatagaatctgtgtataagtggtgagactgatttcgatccatcctgtatcggcatctcaatgcttgcttgcaagctaggggaatccctgccatagccagaaagtggatatcgagcttcatgagcaaccgccacgccagcataggatttgacgacttccgtaccgaattagcactgttggagaacgcgggattggcacaagggtcccccctctctcctatcctctttgcattcttcaacgccgacctagtagaccaatcggtcacccttcacggtggcgcctcggcattcatcgacgactattttcgctggagagtaggccgctcagcggaggagaatttggccaagatacagtccgaggacatcccccggaccgaagcatgggcgcggaggactgggtcctgcttcgcagcccagaagaccgagctcatccacctaaccagaaagaaaaccgaacacctgcatggtcaaatagtcgtaaacgggacggcagtcacaccctcccccacagccaagttactgggtgtcactttcgaccaggagttgcggtggaaggagcacgtgcaacaactgattaagcgtgcaaccaaagtcaccgtcgctttaggcgggctacgacacctgcgcccagaacagatgcgacagctctaccaggcatgcgttaccccagtcgtggattatgcatcaaccgtgtggcacgatccactaagagacaaaacccaccttcgacacctcaacacagtacagagaacctcactggtccgcatcctgtcggcattcagaatttgtgagatgtaggggccgatcgacgttcagcccatccgctgcctgatgagttgcacgtgagtacgaaggtattggtatttcctaataactagaagagggcaataccatagttcactattacgatacatttcaatatactgaaacgcactaaatcaaatatagattagcgcgctacagaatagggtctaagaaggaatctttgagcgctaattttcagaaacaaggtatacagtctgatataaaaacttgaaacaagtaaatcattaatgttttgatgaagtgcaactcaacaacggttttggcaaaatcgttttgcgatgaaggaacaatattacatgtaaatgtttctacaatttcaatgattgaaaaaagaaaccgccgtctgtgacacgagcgaatccatctccacgtcttcccaaactttggaggcctcttgagaagacaaactcgtctcatcctgctcatttactcgtatcagtgtagcttggccgagaaggccgcttttctcttcattcacagccttgaccaggtcatcaggcaattgcccaaacatcattgccttcgtgatatcctccaatgatctgaagaaagaaaggcatccggggcgagcagctttaatatacgttattaatgcgttcatttggctcatggtaaacttctcatttctgctgtaatatcaggtggtatttagtattgagaagggctagcactgtgtcatgatcactcacattaccatagcgagctgttcactgggtacaagtagtactccaagaccaatgccactcgcaagcgtccaccatcgtttgccccagcgatgaaactcattcaactttgctcttccagaatcaaggttttctttgctgaagctttgtattttaatcccatgtaaggctgccaggatcttatcgttggccattgttgtaaatcggtcgtctccagaccgaggttcgtagccaccgaggtcttcattagccctcatttcgcgggcgatttcaagatagatcaagtaaaaacaaacgagtgccatgcggtgttccaagccatacttaagaagtctcttcgactggagtagctcgaaatatttcgcggcagctggcgcactcttttctagaggcggaaatccgaggacgtgcttatcactggacaaatttttgcgccattcctttagttgaggttgtaatagtgcgtgataatctttcacaatcatgtaatccgcaactgtttgaacctcccgcgcttgtttggtgacgttcttctcttttttcttatcaaagcagttttggagcaaaacaaaaattgtttcatttatattgtcttctcgcgactctggctcttttcgtctttttatttttccttgcgaggttgattgttttcgggtccgcttttttggcgtaatagatggcgttgaacccttgtcgcagggtgtgctgcatttagaaataggtgtcgcgtaggtgccgataggtgattgagcagttagtaggatagtggcatttccggttgagctttccacgtgcccttcgttataaagttcctcatggctactggtctccggtgtgaaaccctgaggggggcttcgagcgttctctagtagattcaacgatggttgaaaagccatgtgcatctcttttcggccacccccttgcatatctggagctgaagagtcttccgttcctaggcttgaaattgcatttccgagtgtgtcgaaactcgtatctagtgttatattatggttattctgaactccggtgttcatcgaattggcttgaactgaaatcggcggcttcagaacctgaggcggagggaattcgcagttaataagcttgacattcatgaaattcgagttggcaatgtcagatttgtcgatatcagagtcaacgatgatacatttcgaaacaacagcgccatcaatatcggctttatcaagcactgttgtggtgggtatctggtttttatcggcatacgcggcgataatagtgtctgtaattcgcgaatgtctcatcgtaacgttgatgcaaatcacttgattcatgattgtgtttttgatcttgctgttggtaatgaaagcaaaattgatgacattcccagtagcggggacggtgtcaaagctttgcaaaatgttccaatcagatgtgaaatcaagacaatcgtcaaattgtggatcaaaaagctgattcaatacaggacttggcgcttgtgcttgttgatttcccgagtcaattgtatcgtatataagaccggtagattcggtttgttcggactgagctgagggatccatcatcttttctttcattgtcagctcacactaatatgtcataattgcttttagaagaaaaagaaaagcagtttaccttagattttacttctcaatgctcaaagtttcaggtgggtttcaatgtccaattccaagcattggcaattctggtgtagcggaggcaggtctccgtaaacaataaaagtagaagccgcgttggtatgaaatgaaggaaccaaaaataactgaataaatcctcgtagaaataatagagagtggacggtgagaacgcatctaaagggagggatgcgaggcaaagagcgaagaatggaaaacaaggagatataaacatcatgggaaatgatcagtcacgttccctgagcagaatcgttcagaaactctgagattagaaggacaaaatgcattgctcaaaacacatgacatcataaaactgagcagagctgagcactaaagtgtggccgcgacaccaattcgtagtcgcagaaagctatcgtggcctaaataacggtgccgctttccgaagagtgtcgcagccccgctcaataactcgtgctccaaaacggtgtcgcaggccccaaaattcgaaacacccggatgacttgactattgtaaattcatatcacctaagaatacagtattctcgcataaccagatctgccacggataatttaatccaatacatgctaagaatacaactcccaggccatctgctccgcaatcaacaaaccagagcctctcggagctatggctgatactcgagctcgatcatttgtaggcgttggtgtaaatatcctcgagcaatatgtcgcagattatctcgcaagcgtgccgaggcggaagctacaaacatatccatgtcagcttttggcaatatatcctgtttttagaaccctactgattaatagcatttggcctctctcatctcgaatattggggagtctctcgattttttcaccggaaacctctgcgggaatgatgattgagtagtccggtgtgccctgatatagaaacgctcggtcgtgcttgccaaaaggcaatttctcatgcgagagaagccctcgcccaacgtagacagatatggcaagtatctaaggctccatcagcttgctggtcatagaaaaatcacattgaacgaacgtagccatcatccagcacatcgtcttttaacaaatcgttcaggaggccttgcatggaaatagcaacatctatatagttagcctgtcccctcctgttcgtcggcagcaagaaaaccaaccaagcgattctacctgccatatcaagtgcatcctgcggacatgcgatgtgcacgtattatacccatggatcaatttcttcgcataaggaatgatggcggcaattcctgccccacttgccaccaacagcacactctcatatttgtccacacactcgctgattccgtggggaccactataaagggccaacgaagaaaagtttccctttggtgctgcgtgcgcctgacggacaagagttttggtgagccctccacgaggctctaccaagagatccaacacaccttgatctgtccgagaccaagacgtgatcataaatggatgcgtctgcacccatgaccataagcctagtgaaggcagccacaggttgatgtattgtccggccattgctttgatcggcctcggtaggatgaggcggactcgaatgggcgttgccctcgcgtgttggcctgcattttctgcgtcgcgctcattcttatggcagatcgcaatagctctcgggcatccgttgcccgaaaatagaccgttcctataaagaaagagtatcaagtgggagaaggatgtactgcccaaaatccccaatgcaatatagagatacaaccgggaggaatacttttcactgggaagatgccgccaaatcccataaacacttacgactgcgagtgcctgatgaagtcgaagaaacaactcgtatgaaagtctccgacagaaaggcaaggataatatgacaagggagcacagacatccagcgccctaaatttcataaagctgttagatcagatccagatagtgactgattcactttacaaacaattattgcagagagacgcccagtatttatctcctgatcctcatgggttttgccctgtagcatggccaaaacgtgaaacactaccaaagctaccaccatccagcctgcagcgcgatgcatccgtcggtaaattctcagagaaatcccgagaatatcagccaagttgctcaaatgccatgaagccagaaggaatatcatattgagtagcgacagagttcccgctcggcgacctgaggctgccatagatatactgttgaagaacaggagcagcaggttgattgcgaggtagatcaaatgaagaaaaacaccggctcgtgtccaaggccccagaagtgaatggcgaccaagaacatacggatatgcaagatgttggtaaatgaagacattcatcgcgttactccagggcgcaaagactttcaaggctctatagataacaagacttaggaagatgccaccaatggcgatcgcataaatagtcaagatatccatgttgcgaactgaaagcaaagtgaagcccggtctgttatgtccttcttatagaggaagtatcagttacaagtcgaccttaaaataggtcgctgagagtaagtatactcgacaaaccctaggagttaggtacttggtcgctgtggatggttcgagcagcataatgaatgctacttccttgcggaataccgaggacccccactgagaccttgagcaaagacttattaaccacgaagcggacaaggttacagtaattcgaaatattatcatatatccaatggctccaagttccgaacttatctctacaatcactgccaaacaagacagccctcgcgcgagagcacagaaagtacgcaggcgcagaaaaggtcttttcaaaaaggcagctgagtacagtattaactgtgagtcggacgtcgttgtagccgtccgaaatcggcaaagtggtcaactatatatcttcgagtcaagtaagaagaagtggcttccggcagaaatggacatggtatgaattttttgtcgtgctggaagccatcttgcttatcaacttacaggacaattattatccacggccaattacggagaccacggaagacattattccttgcttggagaggttggaagaggaagaattgcgggcggatatagaatgaattaatatatctatgttattgtcacagtatcgttgtggggagatatctcgtacttgtatagaaggctagaaaatagaaagcgactatagggctgtgctgtcctgttccatcacgttgagggagattttatcaattaacagcatcaaataattcggtacggtcatgtgtagactccagtctttgatgaaagagctcacgtgatcgtatcgaatattcgacacggtcacgtggtaccagaaccttctccggaagttccactatcccctgcccccctcagtgcgaaggaacaaagattttccatccgcgctcggagtgcattgagcgctctgtctacgtaagccttcgtaaggcccatagctcaccttcattggtccattctcagttcacatgatcttcctgcaccgggcattgattaattcagacctgttgaaatgggcctacttttttaaccaccccgttcaacttccactccgtttctcacctgttgcctttaagatgatcaaaaaattcgtgcttatacgctttttcaggagtgatttagtgtttagaaatgccgcgtataccttgtataccttgtatacattcaatcctcttttcaggctatgtttatcgagttgtcgaagtatgatgcgaattcaacacccctcatgatcagagagggtgagcgagtccgaaatgaacaccgggcagagggcgaatcccccccattcaggtcttcttcgcccgcccatctctctacgatactctactccacgaaaccttccagtggcccggccaaatcacagctttcgtcactggactttctatttcgctacccaaagcttttgtgtcggaaatgctccaacttaaattaactctaaatgtgagttgttttcttgcttgaatctctcatcatctgacgttgcctacagaacactcatgatacagagcagaacattctcaatgacttactaccccctccgtcagccgataaggtttgtcatttccacctccgaccggtcgcaaggtatctaattcaattgtagattgcacgcttactctgccactgttgcaatattctatcttccctttctcgcgataagatcgccctcctctacgagcgagcccgaacgagcacagattgtcttgtcgactttgatataaaggaatactgccaagtgaagtcgcctgcagcaggtacctcgacctttggtagtgtcgcacatactagatcgcttgagccagcctacatcggtaatattttatgtttctaacgcacgaaaattaccgttacttactttgctcaacttttagatccttccttactcacgacgagtatgaacgtacgagaccgcaagatagcgccctgtgtttcaacacctgatcctagccattttccaaccctggcactttcgaacgcgggagtcatgttgagtcaagcagcctcacccccacgcggtaatattcaaaaccctacagagatcgggctattggcgtttaaacaaaggctaacttaggaatatagaaacagtccccaatctccataccaatccgtctcccgtcatcccacacgatggttgtctctccaataagttcgactgggcactccgagaatataacaatctaaacgcaccagacccttcactcaatttcgctcctagatcctgcgatccaacaaaagaaggtgattcatccatagtacatttgacaggagggtccgaaggtcaataggctcccggcatagctttcgataaagatggtcccatagctagcatcccaacgtctcaatctcctgtatacggccgccctgtagggataggtaagaggtcaccagaaattccaccgcatcatgcttccgctggtattatggaagaagggggtttgaatgagatggaagtatcggatgctgaagaagaagcacaacaagatatcacgggcaaaaatccaattgaaaatcgcccagccgatggattatcctctccatctctatatccagttgcaggtatctcttatcccacacctagttcaaatccgccggatacgtcagtcccaacgactaggcgtgtagagcgatcggcagaagtgacaacaagcgacgttaactcagaagatcgaactgtcgacaaatatcagagtgcacgcaccctctcgaaattacagccaacagtcgaagatacccctgataataccgaaattgataattcagagactttatctgtcaatgacgaagacttattgatggatgaagactttagagagtcggacattaagtccgccttggacgatgtggtcaagtttttgcaggacacttcttacaatagtgggaccccttcaactagtgccaatacttccgtaaataccaagtcaaatccaaaaagattaactccagtgtctatctctcctacctccaatagaagcgaccagcataagcttatcaatgggaaacaacagaccaataatattcaagagactttagagtataaacgccgccagatcttacagcagaaacggaagcttcctgccagacttgaaccacactcaactctctacaccaggaacctcaggccccgtcttaacaggggaaaaagtgggaatcaagccccacatgacgacaaacttacagaggatgttggcaaaaattcatcctcggaaggagtcctagcaggttcagtggccaaaagtcgcgcagattcttcaagtattactcatctcaagacatcggtaccctccaattcagataaagacaaatagagtggtcccttattataccattctctcctgtccactctatcatcagaaaaaaaaagccgagattaaaaggaaatgcaatcgtatcttacgacctgatttgcctaagttcatagaaaagcacaccaaatcatagaaggctaccggattttaggattctccacagcttagcgtggagaatcattccctcgtatcctccaacacgaaaggctttacaatttagagatacgtagatactatacagacaggcgaagagacacattacctcaaatctcgacttacagatatcatactttatttagcgtatatcaaagaacttcgcagacaaaaagataccggtcatcccccccagactgcgaaggtcaaagccacagacatcatctatagcacagcgtccctttctaaaccattagcagagaaaactcagaagacttttcacgagcacaagctagttggtgagcgctagtagtggtccggttaccatctcggacatggattttttctcttatatagtcaagaaacgggaaagaaaatgtacagtttctccaagttctctggcttcgcgtcttccgctaattattctacagacaaagcaaaattttttccttagacgcttttattttatatattctttagaactgccagaatattctcgcttattacagaaagttcgaacaatcagtagataagctgttatccggcggcaaattcaccgagcagctttctaagaaagaagtacaattatagatccgcgaggccaaggccgtcagctggaacaacacacataccgcttactggaagccctagagcacaaataccgtggcaagcaaggcgtcggaatttctcttagcccagtcaagctgaacattttcgccgactttgaagctctcactgttcctattagttctcgaatgtatacattcgtttactattacactaacatctacacatctttaagccttaccctgcactcgttacagacgtagttcaattattagcaacatacgagataggctgtgcgcagctacagtgactgcttcgttcggaggttggcaacatttcagcgccgtatcggtttccaattcagcccctacaagcatccacggatatttagataaaccaagtatcgcctagtcactgcttaaattagatacacctttatacggaaacctttattttatattaacttggcgtaggcaggtgtgatacaatcggtaatatcgtgatatttttttaaataaacaatggcaagcgtgacgtttatcctataacactcagcccaggtctagcttggtcgttagacagatactaggctatataccataaggtggatcccgggatttactcacttatttccagtatacagggattctattgtcctttcttttacttcctcgcgctacatcttatatctagagtgaactataagttacatattcttaatattaattattcatcttgaaacactatccacctctaacgtgattccttaccgagcggccatccctgccgagcggccaccccactccaaatttcctatctcctaagcaacctatgttttcaatcatccactatacccctaaaacacactaaaaaagcccaaaaattcatcgaacaggagggcaggatcttattagctatcaaagctattcaaaatagccaaattccttcagtcgcagctactacacgctctttcaacgtccctcgttctaccctgcgggcccgtctaaccggccgaacaaatcggtctgatattcgaccaaacggccataaatttactcaaaataaggaggactcgattcaggattagttaatctctatagattcgagaggtacagctcttacaatcgaaatattacgagatatggccaatttattacttcagcgccggggtgataataccccccagactattagtaaaaactagccaacccaatatcttaaacgacatcccgggcttacaagccgattctctcgcaaatatgactatcggagggccttaatagaagatccaaaggttattatggagtggttcgatctctttcaaaaaactattatcaagtatagggatatttacaactttaataaatcaggctttacaatagggattagtacaacgactaaagtgattacccaatcattttataccggtcggagaggggttttacaagctaggaatcgtgaataggtaactataatcgaggctattagtacatctggatatacgctaccaccatacattattttcaaggggaagaactttatggaaagatggttcgacgacctccctcaccaataggctataaaccatagccctaatagatagacgagtgataagattggtattaattagctacaaaaacactttataccgcatactacaagccgtacgaagggaaaatatcgtcttttggttctcgatagtcacaacagtcacctaacagctcaatttaataagatttgcgaggaaaactatatcataccaatctatatacctgctcatacatctcatcttttacagccccttgatataggctgttttgcggttttaaagaggtcttatagaagccgggttacaggatatacccgattaggcatcaattctatcgaaaaagataactttatcgatatattccctatagctcgtacggatactttcaaagacactattatttatagtgcttttacagctaccggtttagtcccatttaaacctaatcgagtgctatctaagctcaatattcgtcttcaatccccgcccctactagatcggcctagttcgcaaggctcaacatcagatagcaatatctcgactagtatacctcagaacactaagcaactagcaaaacgcaaagctaggatcgatactgtactaggtaataagtcaaataagctatctagccctactaagcgtgatcttgagcagtatcataatataaccctcaagatcatacataagcttattttccaggataaggaaattaagcgattacgggctgcaaatgcaaaacaggtgaaaaagagggctaaatcgacaaagcagatatcctaccagggtagtctaacaaatcgtacgatcgctgatatagatagtaatagtgatattaagagatatatatctaatacaccatctatcccaaccctcccggcagagcccgaactacctattttacctactatacgtcgtcaaatcatatgctctaggtgcagtcagaaagggcatcaaattactagatgccctagagcttagtttagtgaatttaatggcgttttagttgattaattaatgtatgaaaattcggaatactactagggtagccgctcggcagggatagccgctcggcaaggaatcacgttacgtatacgtaagaccctctcattacgtaaccgaataaacttatcggagcatatctatctctctgaaacaatataagatactccttactaaaacctacagtccatttaagatctaagctttaaatttcttataaaaagtagcaatgagatgacactacctctcttcactcaattgtattttggagtagttatatttcaagccattcatactgcagcagttctacggccgactttcgataggtcgggtcaattataagcatacctcgaaggaagtcgatgaagacgggaatttcagcgtcagacatacagtggggtttaataagtctgttcccacccgcattttcacccatgaacattgaaatatatatctttatatatctatgcatagcaccaccatactttactcaatttacttcgaattaaatagggttgaaccctatgccaatctcgggtaaaatttaaatttaatattttgtataatacccctttgccttctgtactgccatatatctgcgccctatacttaaaatcaatgaatcaatcttcgactgcggaatagcatcctatactatctttatataccttttgaatactatctaatcctcctcagaccttcctatatatattagcttaggaaataactcaaaaagtttaacctttagccaccgctatataggttcaatcgggtttaaatctagtgagtgcggcagctactcctctatatatatcccgtgagttttaaaccattcctgtgtgattttagtagtatggatccgagtgttatcttactaaaagatagagtagggtcgatagaatggaagtagaccttcttcgagagtatctatataggaaatagtagtatatcctgtcttcttcgattccgggttaataatattctcccgccttataataatcaactctaatcgacttcttaaccagattgtaccctaaaccatttgtgaaatatctttaatgtataccttagcatttataagatcttttctatagccctccgaccgaaagcgccaacaccattgtggtctgcagtttgttattcgttgtacagaatactcatccgagaagacctagttttaaacgttatttctagaccactcagagcgctatttttgaataaaacgatatcgttgtcgagctaattcctttccgattggaatcttcctttttgtcctatattttagaagaccggttggccttaaaacgttaataatagtagagtgggatagatgactaggtatagtataactcagcgttttataggaccaaaaggggtgctagcgggcgagtataaaaagtaaatggtgagttcgatcactaaagatccttgggcgaccggttcgagggagagatttaatagtattgtgttctttgaaccgtttcaaagtattgtaaatcgttcggcgggagcacctaaaatcgagtgctagctttgactgggtggcaccggcctggtgggcataaataatagctgagcgctgagtaacagatagcttacctgattttgtacgacctaaaccaaggatatccttggttaatgccattggggggtgtgtaggaagaagaaaaaaaaccacgatggttgttagggggatagcaagtggggcagtgggaacagactttttgaacactatgtatcattgggtttaaggaaaggcctttcagcgccatctattagcctttcaagactagtagatatcagatctaagattcgaagaagaccgcctaagcagaattagtaaaattaggaaaatatgatattagcacttcttatttaaaagaaaggcataccatctgtattaaaaaattccgcagttctgtttcctttccgaagaagctcaggcaggaaattaccaagtatttcgattatccttgcgagccggttatcatcaaccgtccacaaaccgttttttaataccactccagaaaaaggcactatcccctagacaaattcaataatctattaaaaattaggagataaaaggcaacctcgccacagtttaagcgaatagattaaatacctataaggcaaccgaggctccagatatcaaccttagtatcctaataggcaccgatcgtgacttctagtactcgtaaagctagagattggattatatctaacagatgattttctgaccaagaagctacagccaaggtaagtgtcgcccagaaagataacaagacaagtgatacatactaacaccgaagtcaactattctaatatacagctcacacatctctgagataagcggcgtcctaataacctctcggagtagctttataataccacacttattactaacctatacaggaacttcagatagatatttatcaatggttttttccggattttccagctcaagcagtatattcgtcggttttagatctatatatcgactataattaataccattattgtgagtaggaggctattcgtaacatatggtattaccggtataaatgattccacactcctcatagaggaaatccaaccctagtagaagctatcgcgctatagttcttactaccttagtaggcaatctcccattttcgtattttacagtttaaaaatccaagtagtggcccaacacgtcaaacacaaagcatatatattgtccatttggccctttgtgtttgaattaatctagaaggggtaacacgtaatatcggccttcatggttactttttctagagatattagataatttcgagagaatttctcgctcaaagatatcatacgagccaccgtagcaatcggctcttagtattttaagagccacatacctttaaacccttcaatactcgataagctacatatttaataaatgtggagaactacactcacttagaatccctagctaaccaaacggtagaatattgtccgtagcctagtttcctcatcactttatatataccggagttgaaagtatctccaagcgaaacgggatagaagcctccagtagaataaaagtctacctcttctattatctagtataggtagggagctcttgacgtttaagaaacaggttcaaagaattttacaagccaagctcgagaatttacccgagtcaaagctcttttaaaagtagtaatcatcttaggatttttttggcaggattagtggcatgaatcttttgcaccggtcatcgaacaaattataaataattccgggggattcccgaacgcttataagttactagacgagatagtcacgtgctcttatagcagcatagctcactcctgtgctaagagcatcacatatatctaaaataattagcgtgtgaaactaagctactgagtgtctatacacgaagaacctctgggactttaaaatgataaaggccgatcttaccataaggcggtcgctctagcttctctgctcgcggctcggcaataactcatctccacggtcgcatcgatatgactcaatgtaggtccttgtttactcgactcgagcatggctccgtccacgaagcatctctttttaattatccagcgaattacacgcaaacctttttagaagattattgatctactctctacattacttaagccgcggggaggattaaatcaatagaacttcattatcatcactagtcgctctcacaggctcagtggactacttatagtaggcaggccatgcccatttttggctaaacgtcatatatttttcaacaacctgcagatataaatataaaaagtttgcaattacacaagcaccccaccccgggtaggttttatatctcagacctcctgacaacgttcaaccaacaaagcctagtaccgacccacaaggaaagcgcagcgcatatcacagcttcaggtgcgatttaagtaacatcacgtgttttaaaccgcacagcgaagtcaacgtatatcaatagatatatctctttatcacaaattcaccatcctctttaatcatctcaacagtccagtactctcctttagggtctaggtttctgggatcattatatttcgctcccctgtattggtaagcaagccgcctttgacacatataaaagcacttacttaacaaccgcttcagagactcctcgcttctccatactatctttgttggcatcatagaactttttgatagccgtctcggcttcactacgcttctcagggctattcttatagatatcttccctaaaccatcttatggccctaaggggatatcctagaataggagttcgaaacataataaatgtaaagataaagaacagaactttagcaataactatccagtttagaaagaaaattgtctttagcttaaaggagggcgaaagatactgctatttaacatttctagtatttcgaactccttaaaattgcgcataaagggcctccaatcgataaacgcttagaccttggcgtgaaattgctaaccaagtacactaaagttcaaactacgaggcaatacgcgcgcggcaggtcagaaatacagtctcggccaatagagactaatatcacctgaacgaaggagcgccaaccccgtagccgtagtgacatacataaggccagactaaacgccactaggtatacccatattctagaccctacatatcaggtagttagcaaatggcataggatatagctacatacggtattacgctattattattttaatcgcgcgtactaaaaccaaaatacatacaaaatagcgttagcggcaaggcgcacgcaaccttccgaaataagcaactaaaagagatcaataataaaggctgaatggggccgatgtcagaccgccctaatacacctgtatatcaatcttgatcaggggtcgtgctgagcagatcagctgtaaagtcctcgaacacgaccaattataccacgtcccttcggatggccatccagaaggctacgtttcgattggtcttcctggcactaaactatatttactctacctagggattcaatcataggaaaaagtaactggtagctaaatatatacctacggggtatatctaaatctctcggccgtctaaaataagttaattttgaaaatacttaggatacaagctagccgttacagtactgtagagtacgtaaaatatatatgcacggataggggaaataaggactacgagaattgcgactcatcctacattctctccagacacaccaatgattcatctttttttacacaacaaagtacaaaatccacgagatcactttccattttgtatgtgtctctatacaatgaacttccggaacggaggactaacatacctcaagattattcgttattactaccttatttttccgacttaggctcccgtcatatgacgttaggccgtaacagccccgcctattcctacatcggacgaaatgtcgacaagacccctcgcttcccaaagcacatctctctatagttggtaagtatcaaaccaggtcgggtaaaaccatcaagctgactttactacagtcaacttctaggctttacgaagaaatagcgggtaagcccctgtgggaaagcgcgaaaacgatattgtcgaatataaggggtcttatccagagcggaagcatggaacgggtcaaagagagtaaattaggctggcaataccaccttttagaggaatacatcgcaataaaagcagatatagaagctcggggtcataaagtatatatcatcttaccacagccattttataatattaatcttacagtccttatctaggtactcgattgcacagtctttcacttcgcattagccgctaggcttaagaaccccacaaaacggctgtggctcgcgcccatacaagggaaatcaaacttaacccgtacagaaaccttactgccgggctcatactgggacattacagacatcgatcgagttctcacgccagaccgcttcaccggctcagacatcctaatagtaacacttgacaggagtggaaaaaattagatacatgaatggttagttgtcaggacacaactagttagtagaaagcaaattgcaatgtatacaacaacgatatatattatgatcataccgagctcttcaatttcaaaacacagaaagcatagggcgttcgtgatatagaaggttattgtcgtaattgcggaggccctcagattagcgttcgctctgggtagtcgataaaatagttctatagccgggattgaagactagagagcggccaggatcaaactgggcgcagagttccatatccaccgtctcatcctagctaaccgaagggatcgtcccgtagtcaaattggttgaatactggagggatgctgccagggtcaaactaggcgccgagatccatatccgccgtttcatcctagctaaccgagggaatcgtcccgtagtcaaattggttgaatactggatagatatggccagggtcaaactgggcgccgagatccatatccatcgtctcatcctagctaaccgaggggatcgtcccgtagtcaaattggttgaatactagagggatactaccagggtcaaactgggcgctaagattcatattcaaggtttcatcttggctgattggccggatcgtttcatagtcacattgattgaaatttggtaaaacttgatccatgtcatatcgggtgcggagttccaagactctactttcatgctcaaaaactggttgtatctgtcttatcaggtatacagccgcttccgtactatgactcctagcagagctcatatctgtttcggtattccttaagtgagtcagaggtcgaggctccgaatcctgattgatcaattcagagatagccagcggaacgcttctttcccgtggcgcttgaatggttaatattgtattgtactcaatcagaggaggctgtcgtctatcatatgaatatgagtccggctagtaaagattgaagcgattgtttgatattgtaggtccagaggtaagtagataactgcgtgtttgctcataattttgtggttcacccaatgtcataagttgacttggaattgtatagagcaaacttccgctaatttcacacccccaagttctttaaatctttcgccacatagtgtgccttgctaccgtcgaaattagaggtactcttataaatgtacgacaaacttaccatcatatcggatttgacaggcagtcaaccataaagatttgtcctttgccaaatcatgccaggcaccagatttccgaagcagatgtttcagagccacgaaacttccatacttgacctcgcgaaacaaggtgaacaataatatcaaaatggctgacactccaacgtgaccatatatccgttcgaaaacgagcaaacgaatgccgtctctaataccatgagatgccgattccttgtttttgaatgaaatagcgtttgatgccaggaacctgttgatgagcccactgttatcgtcaattacctgcggagctagtgaacgccctgacacttgtgacgttccgaaggcttcacgttcccattcatcgaactctattgcgagggacctttgtccaagtccgcgtcggaaacacgcatccagtgagcagccccggttgcaaagtcggatatcgaccacacgagggtcctcttgtacccaatcgtcaccgttctgcgcaagtggatcgggacgagaagataaatatttgaaaaccttttcagatcgacgggcaccctgaagcgcatccataagcctttgagcatccaaggcttctgatgcttcctcggtcgtgtcattgttttcaccagtctcttccacaaacgattgggtagcgcaggatgtcccactgctaggaggtgtttccgagcaagtaatggaagttgttggtgtaggctgctgggaagaatgttggagactggtttccgaccgtggagcctcgctcggaatagtgtctagtgttctctctataattcgcaaggtttgttccaacttggttcggtatggtataaggtcttgagtgctaattgcacccagtctcgacaaattttgaatcgcctcagcaatcgcagatatgtttatcattatggggaagaagttgaaaaatggagaaagtcacggtcgagaagaacgatcaaggccgaaatagcgggcattgttcaccgctcacgaactctcagatgcagcgagtatgtgcgtatgggatccctgctagtgcgccccaaatcatatttcgggcgcactagcaaggacatctcctgcctgtggcgcatttacccctcagctcatcggctgagtcttctcaagaggctgcctgactgcaacctgttggacactatgaactttaaatcttggcccgttgactgcagctaagctgttgttcactaagagataagtttttcttttcttcttttctttttttacactagtagaggatgtcgttggacaggatggggttatcagttctcccccgcttagcgacttgaatgcgattttggtatagtaacatctgaacaagagatgccgactcttctctgtgtatcctgacataaagagccttctgattttctgggctgtcaatcattcgaaatctcatttgagaatccacggcagcgagctatgatttgcttcagcctacagagagtttattgtgcggtttcaaactgcatttcccgcctcttctccttcccaaacagctcgcgcgagacaattctatttgggggcccagaccccaatcgaagtagtatgcatgcacttgcgaaaggcgccatgcctacgatgttggaagaacagccggccttttctcccccttcagactctagtctttctgccaaaaactcagtaccgattcgtttacatgtaagtcaccctttctcgacattaacacaaactctaaccaaataagaccgtacgaatttggttttatcccaaaggttttggacttatggaagacatcaaaagaaagggcctcgaggatgtggtttttgacgccattgttcttccagatgtcagcactcagcatccctcccaggatcctggaatcacaacatccgcagtcttagtggatcttgcagtatttgagatcggcatctctcgggttttagggaaatatgggattctaagattcgatcctctgagcagcgatgatccgattgtcttgcaacaaccagtggaagacctcgactcaaagaaagctctttgctatcagcaccttcatttcaaataccgacaagagtatgaaaaaaggcagcaacttgcagaaatcttgggatatcagatgcaacagattttgacggattggtatgaagcctgtcttcaagacattggcaaacggtttgaaaggctaggataccgttgataaagtagatacattctcattcatcctaataactgattttaccaccaaatgagctcaatacagaaagagtaaaaagtcgaaactcggaggggccgtgtcacacataattcttcgatagtgaacctcaagtatttccctcactgcaatgtcgtgtggttttcgtaggaaagtaatcaaaccctgcgatgcttgagaagatgaagcatcaaaatgccaggtgattacggctagcattaggacagtgccataactgaggtcgtgaaaaacatccccctggagagagagtttctcatcaaggtactgttgtcgaaccctgctgttccgcaaatccttgcagacatctaataataacctagcatcgtggctggtgtcttctggtggtgtccatctcgaaagtaacggagaatccattctcaaaaagagcagagcctctagagcaattcttgccggcttgtataggatctgaagcggaaagggaccaggctttgatataagaatttcgtgatcaccggctaaaggtatgggtactcaccatgatttaattttttttcccttaacggcgaggtgcagtcgatggctcccttcaacaatagaaacaagtctttttatcaccgaaattgaagcacacgcccgaagcattttgtctttattaatgttattatcaagttatctacagtgtttgaaactgtatccaaaataggcctcatgtcttgcctttcttctctctcgttacgtttcattactcctgactggatagggtacctttgggggccggaagaagaccggaaaacaggcgaagatcgagaacctgcggctttcaaccctgccagtccgtacaagtggactgaacacgcggtctaccggctggaaaatgataaacctgcattcagccctaagaagcctctaccagtatgcctcccaaagagaacagagacgatcagggcatcgcgcatcagatcatttgaagattatgcaagtgagtttttccacaaagggcaggactcctgattgtgccttctcactctttatcacttagagcacagttctccaaatgcctctcttcaatcggacggcaacacagacagagaaattattgagctccacctccctccaagcactcgacttgtcagaggcagagttatcggcgaagtaccccatggattaactctttggaattacaatcagacattcgttgaacatggtgccaaaccttgatcagaacaccgagcctctagtaaggttacttcctcattacttaattctcaagtttgttgactttttatagcttttaggtatctacatattggcggtgctgaaggtatttcgggaggctcgtagttagaaacatggagaatttggaggattgcagacaccgaaagcgaagacaggccttgatatcgagcagagatatctagaagaggaaacaattgggagcaccaaatacaaatagcaatatacacgacgaaattgcaaacccgccaatcttgcatataatgttatactagccacttttcggatttgcaattttgtcgaaaccattactaccatgtaatatgaaggagtaaatattgacgtatagtgaacattttgaattgattcgctagagctctgcagtaaatgacacaccgcgtctgaggtgtgatcatgacctttgctaactatagattacttcaatggaagtgaaaaatagcctggagagatcggctatttgcaaagcaaaggtgggtttcatatatcttcttctttcacaacaggcgttctccaattctcctggttgccttatagccagatttctatgaaaaggcatcaccacgagcgaagcatccatattcttgcaataaaccttcattattttcatataccaagatgaaccattcgcagtcatccactggctcgctcttcgcactccaaaacatgatcaaagttcggtatagcgttatacaaatgatactaattcttaactatctcttcatcgcatcatcgaccgccgagaatgaatccgagcttcggagagttataactatggaagagaatgaatgggaggccggcttcgtgcctgggcagtttgaccacatgcaggtagagagatggtggatgaagacacgaaactttctcacacaagcaggatccctccgtgcgttttcagtggaagatttaaaaggccacctcgggtatatgctcttcatgcttggcgaaatttccctacggccgccctctcccaggttcatgccaaggacgcggcaaaccccttctagaagaccctttgggagtagagcaagtatagctctcatttgctacagcatttcgggagtagccaatatcagtgactatcaatcagttgatccatggttatttgacatgggattcgttcatgatatgctccgccgtcttcaaagatcgcccttattcgataacgacattcggttagacgaactcaaaattgtgctcacaaatctagaagcgattttgtctatggaagatgagcggtccgctttgattcaacctcatccaatcgacatcaaaaatactgttcaaacacaagcttattttgcgacagcatttcgtgcacttgaaccaagcatactattgcaaattttgccgaaatggagaaaactttggatcgaatccagagagaacaacaaagacaaattgcagtgcctgctcaaggaaccaatgactcatggtaggaagcaggacgctattcattttgctgatgccgctttctgacattgacagatatgagagtacaacatattgcacacatctttcaagaagtctcatctatgaatgcactagtgcaagagacaaaggaggtgaagctgttaagaagatccaagcccgatagaatgatacttgttgagatttttcaaatcagaggcatccagcaaagatgcgagaatatgcacctaggttagccgacctgtaccgacgtggcatggcatggactaacatggtgcagcagaaccagtggtagtccacattgcccaggtctcgccaaatccgtgaggtgctcgagccgaacgcccttcaccaagaacaagagaaactacaggaactgggcgagatgagggatctaatcgggacagatgccctaggctgggtttcagatgaggatgagcttgaacggtgtaggggtatcatccagagcaccaaagacggtttgatggaacattcaagcactgagatggataaaattgcggtcctttcccatttccctttcgatgaccacgaacaaaatgcgtgataacttcagatctcgatcttggtagataatatttattcatatatagcttacggacatctgaagatagcttgtcccgaatttgagcaacagatgatcttccacggcgattcgctcgtagttctcgagaccttgttctctactaatcgggaccccaatacctttgatggctacctctttgtggatcccacgactggggcctgcaatataagcagcacggtcacacccaccgaaaagtggctgccatttgccatcggagcctcgacatgccctggacgtcttgctgaaacaagaattacccaggtgtaattctcgagatcttgttctttgctaatcaggacctcaacccctttgatggctaccgctttgtggatcccacgacgggtgcctgcgatataagcagcacggtaacagccaccgaaaagtggctgtcatttgccatcggagcctcgacatgccctgggcgtcttgctggaacaagaattacccaggtcatgttcgccaagatcctatatggctaagatgcagatttggagggtgtcgatgcgcaattatttccaaacggggcggccgaatccggccgcgccggcacaaaatgctttttgtagctaggttgacttcacacacgtacgagatggccctgagctacatcagtatacatcgatatcattgactagttatccttcgctaaagatagacgttgttttctaagtgtagtgctccagtatacctgtattgaccctgagctcctcccagggaatttttgacaaaatcgcttggtcacttccggccaagcaagattttgtttttcccgaagtttcactaataggcgaccctcttccacggaccatggtagaccttttcttgatgcacacgtatgctctgcattgactgtatcgccgcttgtgcttgagttgctggacgtaggtgtcatgtcttcatcgtggtccgagatacatgttgatacaggcgtgtcatttgtggtcgaaggcgagggaaggcagcgaggtaaggcaccctcaaataaccaagacaggaactgtagtcggttattaaccgagagggcggagaattgagcacgaacggtggggaatgaaacgtcgttcttgcagccgagtccgcaagcaaatcggcgggtacgattcttaccgcggctttccacgacacctgcaactttgttgattttggaaagctgccgaataggtttcaccttgcccttggagctatgtcgtctgccacgggagcagacatctttgtccaaaaatcgagaattgccagctggtgattcgcttgaacggattgcgacgcgaggcgtaggctctgccgcttgagtctgcctaacatccgggaaatgatacccgtccaggattgccgggtcgattgttgcatcgtctgaaagatattcagtctgagtagggtttacaggagcctcaacccgagattgctgaccagcagtgaaagcgagcttcgggtcgcctgattcgaagctaggcagttggtgctcagagtcctgaccaatatcaccgaaaattgaactatgatcaacgtttccatggccagatagatcttgcgcatgtaaaatactctcagggtcgaacgtctcaatgtcttcattgaagggtggcggtggctccaaaacctccggcccgactcgaacgatttgtgtgtgtggttgcaaatcgccatgcaaacaaacctccatcggcggacgaacaggaagaggatgcagcttaggtttgggtaaagagactttctggctctctgaaaggggatccctggggtttgagggagacggtgcggcagcgatcgagacgggacttgggtagcgacaggtgttgacaggattccgcgaaggctgcgctttctcttgagtaggattccaagaccgaaaggtctccaagcgataagtggcgcttgacatgttgtgtagagaaggcggcctaaagggttctttggagtctggtggttgggggaacaggggagaagacggggaaagggaaaggggagctgggagagggaggagagggaagaacttggaacgtgaattccaatgttgccatctgagaggaattggcgactcttttatgtatgaaaattgtccgcaaggccaatgccgccctttgcccagtacagaatatcccaatcagctcatatgacccaggccgcgggctctaagacgcaagtaacactagcgcaagtcgaaaaatgttgtagttccggccacggttcacgccaccattaacatcatgctagccctctgcccgtccttgatccgcatgatgcagcaccgatgtcaggtgcgtatgcggcatttccgctattggctcatcacaccgccgaactgtgatatcgaaggctccttgggtaggtgcagagttgaccgtggagaccgacgatgtctccggcggggcgaaaaagcattcgtgagcaggcaactcgaggatcagcgacgccagggctgtgcaatgtaacctcagacgggagctgacgtggctggtggagttgggtgcgcgggctcaaggatggtatccgggacattgcaatggcgaaggaggtcaggaaacgaatagcagaggctaggagctccgggccaggagctccggggggggggatcgagctannnnnnnnnnnnnnnnnnnnnnnnnnnnnnnnnnnnnnnnnnnnnnnnnnnnnnnnnnnnnnnnnnnnnnnnnnnnnnnnnnnnnnnnnnnnnnnnnnnnnnnnnnnnnnnnnnnnnnnnnnnnnnnnnnnnnnnnnnnnnnnnnnnnnnnnnnnnnnnnnnnnnnnnnnnnnnnnnnnnnnnnnnnnnnnnnnnnnnnnnnnnnnnnnnnnnnnnnnnnnnnnnnnnnnnnnnnnnnnnnnnnnnnnnnnnnnnnnnnnnnnnnnnnnnnnnnnnnnnnnnnnnnnnnnnnnnnnnnnnnnnnnnnnnnnnnnnnnnnnnnnnnnnnnnnnnnnnnnnnnnnnnnnnnnnnnnnnnnnnnnnnnnnnnnnnnnnnnnnnnnnnnnnnnnnnnnnnnnnnnnnnnnnnnnnnnnnnnnnnnnnnnnnnnnnnnnnnnnnnnnnnnnnnnnnnnnnnnnnnnnnnnnnnnnnnnnnnnnnnnnnnnnnnnnnnnnnnnnnnnnnnnnnnnnnnnnnnnnnnnnnnnnnnnnnnnnnnnnnnnnnnnnnnnnnnnnnnnnnnnnnnnnnnnnnnnnnnnnnnnnnnnnnnnnnnnnnnnnnnnnnnnnnnnnnnnnnnnnnnnnnnnnnnnnnnnnnnnnnnnnnnnnnnnnnnnnnnnnnnnnnnnnnnnnnnnnnnnnnnnnnnnnnnnnnnnnnnnnnnnnnnnnnnnnnnnnnnnnnnnnnnnnnnnnnnnnnnnnnnnnnnnnnnnnnnnnnnnnnnnnnnnnnnnnnnnnnnnnnnnnnnnnnnnnnnnnnnnnnnnnnnnnnnnnnnnnnnnnnnnnnnnnnnnnnnnnnnnnnnnnnnnnnnnnnnnnnnnnnnnnnnnnnnnnnnnnnnnnnnnnnnnnnnnnnnnnnnnnnnnnnnnnnnnnnnnnnnnnnnnnnnnnnnnnnnnnnnnnnnnnnnnnnnnnnnnnnnnnnnnnnnnnnnnnnnnnnnnnnnnnnnnnnnnnnnnnnnnnnnnnnnnnnnnnnnnnnnnnnnnnnnnnnnnnnnnnnnnnnnnnnnnnnnnnnnnnnnnnnnnnnnnnnnnnnnnnnnnnnnnnnnnnnnnnnnnnnnnnnnnnnnnnnnnnnnnnnnnnnnnnnnnnnnnnnnnnnnnnnnnnnnnnnnnnnnnnnnnnnnnnnnnnnnnnnnnnnnnnnnnnnnnnnnnnnnnnnnnnnnnnnnnnnnnnnnnnnnnnnnnnnnnnnnnnnnnnnnnnnnnnnnnnnnnnnnnnnnnnnnnnnnnnnnnnnnnnnnnnnnnnnnnnnnnnnnnnnnnnnnnnnnnnnnnnnnnnnnnnnnnnnnnnnnnnnnnnnnnnnnnnnnnnnnnnnnnnnnnnnnnnnnnnnnnnnnnnnnnnnnnnnnnnnnnnnnnnnnnnnnnnnnnnnnnnnnnnnnnnnnnnnnnnnnnnnnnnnnnnnnnnnnnnnnnnnnnnnnnnnnnnnnnnnnnnnnnnnnnnnnnnnnnnnnnnnnnnnnnnnnnnnnnnnnnnnnnnnnnnnnnnnnnnnnnnnnnnnnnnnnnnnnnnnnnnnnnnnnnnnnnnnnnnnnnnnnnnnnnnnnnnnnnnnnnnnnnnnnnnnnnnnnnnnnnnnnnnnnnnnnnnnnnnnnnnnnnnnnnnnnnnnnnnnnnnnnnnnnnnnnnnnnnnnnnnnnnnnnnnnnnnnnnnnnnnnnnnnnnnnnnnnnnnnnnnnnnnnnnnnnnnnnnnnnnnnnnnnnnnnnnnnnnnnnnnnnnnnnnnnnnnnnnnnnnnnnnnnnnnnnnnnnnnnnnnnnnnnnnnnnnnnnnnnnnnnnnnnnnnnnnnnnnnnnnnnnnnnnnnnnnnnnnnnnnnnnnnnnnnnnnnnnnnnnnnnnnnnnnnnnnnnnnnnnnnnnnnnnnnnnnnnnnnnnnnnnnnnnnnnnnnnnnnnnnnnnnnnnnnnnnnnnnnnnnnnnnnnnnnnnnnnnnnnnnnnnnnnnnnnnnnnnnnnnnnnnnnnnnnnnnnnnnnnnnnnnnnnnnnnnnnnnnnnnnnnnnnnnnnnnnnnnnnnnnnnnnnnnnnnnnnnnnnnnnnnnnnnnnnnnnnnnnnnnnnnnnnnnnnnnnnnnnnnnnnnnnnnnnnnnnnnnnnnnnnnnnnnnnnnnnnnnnnnnnnnnnnnnnnnnnnnnnnnnnnnnnnnnnnnnnnnnnnnnnnnnnnnnnnnnnnnnnnnnnnnnnnnnnnnnnnnnnnnnnnnnnnnnnnnnnnnnnnnnnnnnnnnnnnnnnnnnnnnnnnnnnnnnnnnnnnnnnnnnnnnnnnnnnnnnnnnnnnnnnnnnnnnnnnnnnnnnnnnnnnnnnnnnnnnnnnnnnnnnnnnnnnnnnnnnnnnnnnnnnnnnnnnnnnnnnnnnnnnnnnnnnnnnnnnnnnnnnnnnnnnnnnnnnnnnnnnnnnnnnnnnnnnnnnnnnnnnnnnnnnnnnnnnnnnnnnnnnnnnnnnnnnnnnnnnnnnnnnnnnnnnnnnnnnnnnnnnnnnnnnnnnnnnnnnnnnnnnnnnnnnnnnnnnnnnnnnnnnnnnnnnnnnnnnnnnnnnnnnnnnnnnnnnnnnnnnnnnnnnnnnnnnnnnnnnnnnnnnnnnnnnnnnnnnnnnnnnnnnnnnnnnnnnnnnnnnnnnnnnnnnnnnnnnnnnnnnnnnnnnnnnnnnnnnnnnnnnnnnnnnnnnnnnnnnnnnnnnnnnnnnnnnnnnnnnnnnnnnnnnnnnnnnnnnnnnnnnnnnnnnnnnnnnnnnnnnnnnnnnnnnnnnnnnnnnnnnnnnnnnnnnnnnnnnnnnnnnnnnnnnnnnnnnnnnnnnnnnnnnnnnnnnnnnnnnnnnnnnnnnnnnnnnnnnnnnnnnnnnnnnnnnnnnnnnnnnnnnnnnnnnnnnnnnnnnnnnnnnnnnnnnnnnnnnnnnnnnnnnnnnnnnnnnnnnnnnnnnnnnnnnnnnnnnnnnnnnnnnnnnnnnnnnnnnnnnnnnnnnnnnnnnnnnnnnnnnnnnnnnnnnnnnnnnnnnnnnnnnnnnnnnnnnnnnnnnnnnnnnnnnnnnnnnnnnnnnnnnnnnnnnnnnnnnnnnnnnnnnnnnnnnnnnnnnnnnnnnnnnnnnnnnnnnnnnnnnnnnnnnnnnnnnnnnnnnnnnnnnnnnnnnnnnnnnnnnnnnnnnnnnnnnnnnnnnnnnnnnnnnnnnnnnnnnnnnnnnnnnnnnnnnnnnnnnnnnnnnnnnnnnnnnnnnnnnnnnnnnnnnnnnnnnnnnnnnnnnnnnnnnnnnnnnnnnnnnnnnnnnnnnnnnnnnnnnnnnnnnnnnnnnnnnnnnnnnnnnnnnnnnnnnnnnnnnnnnnnnnnnnnnnnnnnnnnnnnnnnnnnnnnnnnnnnnnnnnnnnnnnnnnnnnnnnnnnnnnnnnnnnnnnnnnnnnnnnnnnnnnnnnnnnnnnnnnnnnnnnnnnnnnnnnnnnnnnnnnnnnnnnnnnnnnnnnnnnnnnnnnnnnnnnnnnnnnnnnnnnnnnnnnnnnnnnnnnnnnnnnnnnnnnnnnnnnnnnnnnnnnnnnnnnnnnnnnnnnnnnnnnnnnnnnnnnnnnnnnnnnnnnnnnnnnnnnncttctaggacttctacctatatcttataaataatccttaaaatatctactaagatagtatactagaatatagtactctatagtagaagtaatattaatctatacagatatttataatatagctcgatactatctatcgttatctaaagtacctatatagttaatagtactagaaggagtacctctaggccaaagtaatcgatatagtttatactaagtcgttaaaatggcctataaagctagaaatgtataaagtatatatcggatacctttctatagtagaaagtcaaatccccaactagtagaaatcgctttatatatagaaagagaaaagcgctagcggcagtaagaacgatactactaaattagatctaagcctagatactagtcttagctcttataccttatttatattaagaacaaagaaacgtaaggataggtttaaaactaaaggtaaggataagtagggcaataaacctaataagaagcgtaagtataataaataaaaaataaatcctaatagtattccctataataattactttaagtatagaaagctaggctactatatagatacctgtaaagagactaaaggggatttataattaaaaaactgattgccctagcgcttatagtatcggtagtattagggcttaacggtattaagtataagttaaaacttactttcgcttataaagttagtattaaaaccaataatagggagtaaactgtgtaggccctaattaatagtagagctgaaaagacctttataagctagaactaggttaaatagtaccttctatatannnnnnnnnnnnnnnnnnnnnnnnnnnnnnnnnnnnnnnnnnnnnnnnnnnnnnnnnnnnnnnnnnnnnnnnnnnnnnnnnnnnnnnnnnnnnnnnnnnnnnnnnnnnnnnnnnnnnnnnnnnnnnnnnnnnnnnnnnnnnnnnnnnnnnnnnnnnnnnnnnnnnnnnnnnnnnnnnnnnnnnnnnnnnnnnnnnnnnnnnnnnnnnnnnnnnnnnnnnnnnnnnnnnnnnnnnnnnnnnnnnnnnnnnnnnnnnnnnnnnnnnnnnnnnnnnnnnnnnnnnnnnnnnnnnnnnnnnnnnnnnnnnnnnnnnnnnnnnnnnnnnnnnnnnnnnnnnnnnnnnnnnnnnnnnnnnnnnnnnnnnnnnnnnnnnnnnnnnnnnnnnnnnnnnnnnnnnnnnnnnnnnnnnnnnnnnnnnnnnnnnnnnnnnnnnnnnnnnnnnnnnnnnnnnnnnnnnnnnnnnnnnnnnnnnnnnnnnnnnnnnnnnnnnnnnnnnnnnnnnnnnnnnnnnnnnnnnnnnnnnnnnnnnnnnnnnnnnnnnnnnnnnnnnnnnnnnnnnnnnnnnnnnnnnnnnnnnnnnnnnnnnnnnnnnnnnnnnnnnnnnnnnnnnnnnnnnnnnnnnnnnnnnnnnnnnnnnnnnnnnnnnnnnnnnnnnnnnnnnnnnnnnnnnnnnnnnnnnnnnnnnnnnnnnnnnnnnnnnnnnnnnnnnnnnnnnnnnnnnnnnnnnnnnnnnnnnnnnnnnnnnnnnnnnnnnnnnnnnnnnnnnnnnnnnnnnnnnnnnnnnnnnnnnnnnnnnnnnnnnnnnnnnnnnnnnnnnnnnnnnnnnnnnnnnnnnnnnnnnnnnnnnnnnnnnnnnnnnnnnnnnnnnnnnnnnnnnnnnnnnnnnnnnnnnnnnnnnnnnnnnnnnnnnnnnnnnnnnnnnnnnnnnnnnnnnnnnnnnnnnnnnnnnnnnnnnnnnnnnnnnnnnnnnnnnnnnnnnnnnnnnnnnnnnnnnnnnnnnnnnnnnnnnnnnnnnnnnnnnnnnnnnnnnnnnnnnnnnnnnnnnnnnnnnnnnnnnnnnnnnnnnnnnnnnnnnnnnnnnnnnnnnnnnnnnnnnnnnnnnnnnnnnnnnnnnnnnnnnnnnnnnnnnnnnnnnnnnnnnnnnnnnnnnnnnnnnnnnnnnnnnnnnnnnnnnnnnnnnnnnnnnnnnnnnnnnnnnnnnnnnnnnnnnnnnnnnnnnnnnnnnnnnnnnnnnnnnnnnnnnnnnnnnnnnnnnnnnnnnnnnnnnnnnnnnnnnnnnnnnnnnnnnnnnnnnnnnnnnnnnnnnnnnnnnnnnnnnnnnnnnnnnnnnnnnnnnnnnnnnnnnnnnnnnnnnnnnnnnnnnnnnnnnnnnnnnnnnnnnnnnnnnnnnnnnnnnnnnnnnnnnnnnnnnnnnnnnnnnnnnnnnnnnnnnnnnnnnnnnnnnnnnnnnnnnnnnnnnnnnnnnnnnnnnnnnnnnnnnnnnnnnnnnnnnnnnnnnnnnnnnnnnnnnnnnnnnnnnnnnnnnnnnnnnnnnnnnnnnnnnnnnnnnnnnnnnnnnnnnnnnnnnnnnnnnnnnnnnnnnnnnnnnnnnnnnnnnnnnnnnnnnnnnnnnnnnnnnnnnnnnnnnnnnnnnnnnnnnnnnnnnnnnnnnnnnnnnnnnnnnnnnnnnnnnnnnnnnnnnnnnnnnnnnnnnnnnnnnnnnnnnnnnnnnnnnnnnnnnnnnnnnnnnnnnnnnnnnnnnnnnnnnnnnnnnnnnnnnnnnnnnnnnnnnnnnnnnnnnnnnnnnnnnnnnnnnnnnnnnnnnnnnnnnnnnnnnnnnnnnnnnnnnnnnnnnnnnnnnnnnnnnnnnnnnnnnnnnnnnnnnnnnnnnnnnnnnnnnnnnnnnnnnnnnnnnnnnnnnnnnnnnnnnnnnnnnnnnnnnnnnnnnnnnnnnnnnnnnnnnnnnnnnnnnnnnnnnnnnnnnnnnnnnnnnnnnnnnnnnnnnnnnnnnnnnnnnnnnnnnnnnnnnnnnnnnnnnnnnnnnnnnnnnnnnnnnnnnnnnnnnnnnnnnnnnnnnnnnnnnnnnnnnnnnnnnnnnnnnnnnnnnnnnnnnnnnnnnnnnnnnnnnnnnnnnnnnnnnnnnnnnnnnnnnnnnnnnnnnnnnnnnnnnnnnnnnnnnnnnnnnnnnnnnnnnnnnnnnnnnnnnnnnnnnnnnnnnnnnnnnnnnnnnnnnnnnnnnnnnnnnnnnnnnnnnnnnnnnnnnnnnnnnnnnnnnnnnnnnnnnnnnnnnnnnnnnnnnnnnnnnnnnnnnnnnnnnnnnnnnnnnnnnnnnnnnnnnnnnnnnnnnnnnnnnnnnnnnnnnnnnnnnnnnnnnnnnnnnnnnnnnnnnnnnnnnnnnnnnnnnnnnnnnnnnnnnnnnnnnnnnnnnnnnnnnnnnnnnnnnnnnnnnnnnnnnnnnnnnnnnnnnnnnnnnnnnnnnnnnnnnnnnnnnnnnnnnnnnnnnnnnnnnnnnnnnnnnnnnnnnnnnnnnnnnnnnnnnnnnnnnnnnnnnnnnnnnnnnnnnnnnnnnnnnnnnnnnnnnnnnnnnnnnnnnnnnnnnnnnnnnnnnnnnnnnnnnnnnnnnnnnnnnnnnnnnnnnnnnnnnnnnnnnnnnnnnnnnnnnnnnnnnnnnnnnnnnnnnnnnnnnnnnnnnnnnnnnnnnnnnnnnnnnnnnnnnnnnnnnnnnnnnnnnnnnnnnnnnnnnnnnnnnnnnnnnnnnnnnnnnnnnnnnnnnnnnnnnnnnnnnnnnnnnnnnnnnnnnnnnnnnnnnnnnnnnnnnnnnnnnnnnnnnnnnnnnnnnnnnnnnnnnnnnnnnnnnnnnnnnnnnnnnnnnnnnnnnnnnnnnnnnnnnnnnnnnnnnnnnnnnnnnnnnnnnnnnnnnnnnnnnnnnnnnnnnnnnnnnnnnnnnnnnnnnnnnnnnnnnnnnnnnnnnnnnnnnnnnnnnnnnnnnnnnnnnnnnnnnnnnnnnnnnnnnnnnnnnnnnnnnnnnnnnnnnnnnnnnnnnnnnnnnnnnnnnnnnnnnnnnnnnnnnnnnnnnnnnnnnnnnnnnnnnnnnnnnnnnnnnnnnnnnnnnnnnnnnnnnnnnnnnnnnnnnnnnnnnnnnnnnnnnnnnnnnnnnnnnnnnnnnnnnnnnnnnnnnnnnnnnnnnnnnnnnnnnnnnnnnnnnnnnnnnnnnnnnnnnnnnnnnnnnnnnnnnnnnnnnnnnnnnnnnnnnnnnnnnnnnnnnnnnnnnnnnnnnnnnnnnnnnnnnnnnnnnnnnnnnnnnnnnnnnnnnnnnnnnnnnnnnnnnnnnnnnnnnnnnnnnnnnnnnnnnnnnnnnnnnnnnnnnnnnnnnnnnnnnnnnnnnnnnnnnnnnnnnnnnnnnnnnnnnnnnnnnnnnnnnnnnnnnnnnnnnnnnnnnnnnnnnnnnnnnnnnnnnnnnnnnnnnnnnnnnnnnnnnnnnnnnnnnnnnnnnnnnnnnnnnnnnnnnnnnnnnnnnnnnnnnnnnnnnnnnnnnnnnnnnnnnnnnnnnnnnnnnnnnnnnnnnnnnnnnnnnnnnnnnnnnnnnnnnnnnnnnnnnnnnnnnnnnnnnnnnnnnnnnnnnnnnnnnnnnnnnnnnnnnnnnnnnnnnnnnnnnnnnnnnnnnnnnnnnnnnnnnnnnnnnnnnnnnnnnnnnnnnnnnnnnnnnnnnnnnnnnnnnnnnnnnnnnnnnnnnnnnnnnnnnnnnnnnnnnnnnnnnnnnnnnnnnnnnnnnnnnnnnnnnnnnnnnnnnnnnnnnnnnnnnnnnnnnnnnnnnnnnnnnnnnnnnnnnnnnnnnnnnnnnnnnnnnnnnnnnnnnnnnnnnnnnnnnnnnnnnnnnnnnnnnnnnnnnnnnnnnnnnnnnnnnnnnnnnnnnnnnnnnnnnnnnnnnnnnnnnnnnnnnnnnnnnnnnnnnnnnnnnnnnnnnnnnnnnnnnnnnnnnnnnnnnnnnnnnnnnnnnnnnnnnnnnnnnnnnnnnnnnnnnnnnnnnnnnnnnnnnnnnnnnnnnnnnnnnnnnnnnnnnnnnnnnnnnnnnnnnnnnnnnnnnnnnnnnnnnnnnnnnnnnnnnnnnnnnnnnnnnnnnnnnnnnnnnnnnnnnnnnnnnnnnnnnnnnnnnnnnnnnnnnnnnnnnnnnnnnnnnnnnnnnnnnnnnnnnnnnnnnnnnnnnnnnnnnnnnnnnnnnnnnnnnnnnnnnnnnnnnnnnnnnnnnnnnnnnnnnnnnnnnnnnnnnnnnnnnnnnnnnnnnnnnnnnnnnnnnnnnnnnnnnnnnnnnnnnnnnnnnnnnnnnnnnnnnnnnnnnnnnnnnnnnnnnnnnnnnnnnnnnnnnnnnnnnnnnnnnnnnnnnnnnnnnnnnnnnnnnnnnnnnnnnnnnnnnnnnnnnnnnnnnnnnnnnnnnnnnnnnnnnnnnnnnnnnnnnnnnnnnnnnnnnnnnnnnnnnnnnnnnnnnnnnnnnnnnnnnnnnnnnnnnnnnnnnnnnnnnnnnnnnnnnnnnnnnnnnnnnnnnnnnnnnnnnnnnnnnnnnnnnnnnnnnnnnnnnnnnnnnnnnnnnnnnnnnnnnnnnnnnnnnnnnnnnnnnnnnnnnnnnnnnnnnnnnnnnnnnnnnnnnnnnnnnnnnnnnnnnnnnnnnnnnnnnnnnnnnnnnnnnnnnnnnnnnnnnnnnnnnnnnnnnnnnnnnnnnnnnnnnnnnnnnnnnnnnnnnnnnnnnnnnnnnnnnnnnnnnnnnnnnnnnnnnnnnnnnnnnnnnnnnnnnnnnnnnnnnnnnnnnnnnnnnnnnnnnnnnnnnnnnnnnnnnnnnnnnnnnnnnnnnnnnnnnnnnnnnnnnnnnnnnnnnnnnnnnnnnnnnnnnnnnnnnnnnnnnnnnnnnnnnnnnnnnnnnnnnnnnnnnnnnnnnnnnnnnnnnnnnnnnnnnnnnnnnnnnnnnnnnnnnnnnnnnnnnnnnnnnnnnnnnnnnnnnnnnnnnnnnnnnnnnnnnnnnnnnnnnnnnnnnnnnnnnnnnnnnnnnnnnnnnnnnnnnnnnnnnnnnnnnnnnnnnnnnnnnnnnnnnnnnnnnnnnnnnnnnnnnnnnnnnnnnnnnnnnnnnnnnnnnnnnnnnnnnnnnnnnnnnnnnnnnnnnnnnnnnnnnnnnnnnnnnnnnnnnnnnnnnnnnnnnnnnnnnnnnnnnnnnnnnnnnnnnnnnnnnnnnnnnnnnnnnnnnnnnnnnnnnnnnnnnnnnnnnnnnnnnnnnnnnnnnnnnnnnnnnnnnnnnnnnnnnnnnnnnnnnnnnnnnnnnnnnnnnnnnnnnnnnnnnnnnnnnnnnnnnnnnnnnnnnnnnnnnnnnnnnnnnnnnnnnnnnnnnnnnnnnnnnnnnnnnnnnnnnnnnnnnnnnnnnnnnnnnnnnnnnnnnnnnnnnnnnnnnnnnnnnnnnnnnnnnnnnnnnnnnnnnnnnnnnnnnnnnnnnnnnnnnnnnnnnnnnnnnnnnnnnnnnnnnnnnnnnnnnnnnnnnnnnnnnnnnnnnnnnnnnnnnnnnnnnnnnnnnnnnnnnnnnnnnnnnnnnnnnnnnnnnnnnnnnnnnnnnnnnnnnnnnnnnnnnnnnnnnnnnnnnnnnnnnnnnnnnnnnnnnnnnnnnnnnnnnnnnnnnnnnnnnnnnnnnnnnnnnnnnnnnnnnnnnnnnnnnnnnnnnnnnnnnnnnnnnnnnnnnnnnnnnnnnnnnnnnnnnnnnnnnnnnnnnnnnnnnnnnnnnnnnnnnnnnnnnnnnnnnnnnnnnnnnnnnnnnnnnnnnnnnnnnnnnnnnnnnnnnnnnnnnnnnnnnnnnnnnnnnnnnnnnnnnnnnnnnnnnnnnnnnnnnnnnnnnnnnnnnnnnnnnnnnnnnnnnnnnnnnnnnnnnnnnnnnnnnnnnnnnnnnnnnnnnnnnnnnnnnnnnnnnnnnnnnnnnnnnnnnnnnnnnnnnnnnnnnnnnnnnnnnnnnnnnnnnnnnnnnnnnnnnnnnnnnnnnnnnnnnnnnnnnnnnnnnnnnnnnnnnnnnnnnnnnnnnnnnnnnnnnnnnnnnnnnnnnnnnnnnnnnnnnnnnnnnnnnnnnnnnnnnnnnnnnnnnnnnnnnnnnnnnnnnnnnnnnnnnnnnnnnnnnnnnnnnnnnnnnnnnnnnnnnnnnnnnnnnnnnnnnnnnnnnnnnnnnnnnnnnnnnnnnnnnnnnnnnnnnnnnnnnnnnnnnnnnnnnnnnnnnnnnnnnnnnnnnnnnnnnnnnnnnnnnnnnnnnnnnnnnnnnnnnnnnnnnnnnnnnnnnnnnnnnnnnnnnnnnnnnnnnnnnnnnnnnnnnnnnnnnnnnnnnnnnnnnnnnnnnnnnnnnnnnnnnnnnnnnnnnnnnnnnnnnnnnnnnnnnnnnnnnnnnnnnnnnnnnnnnnnnnnnnnnnnnnnnnnnnnnnnnnnnnnnnnnnnnnnnnnnnnnnnnnnnnnnnnnnnnnnnnnnnnnnnnnnnnnnnnnnnnnnnnnnnnnnnnnnnnnnnnnnnnnnnnnnnnnnnnnnnnnnnnnnnnnnnnnnnnnnnnnnnnnnnnnnnnnnnnnnnnnnnnnnnnnnnnnnnnnnnnnnnnnnnnnnnnnnnnnnnnnnnnnnnnnnnnnnnnnnnnnnnnnnnnnnnnnnnnnnnnnnnnnnnnnnnnnnnnnnnnnnnnnnnnnnnnnnnnnnnnnnnnnnnnnnnnnnnnnnnnnnnnnnnnnnnnnnnnnnnnnnnnnnnnnnnnnnnnnnnnnnnnnnnnnnnnnnnnnnnnnnnnnnnnnnnnnnnnnnnnnnnnnnnnnnnnnnnnnnnnnnnnnnnnnnnnnnnnnnnnnnnnnnnnnnnnnnnnnnnnnnnnnnnnnnnnnnnnnnnnnnnnnnnnnnnnnnnnnnnnnnnnnnnnnnnnnnnnnnnnnnnnnnnnnnnnnnnnnnnnnnnnnnnnnnnnnnnnnnnnnnnnnnnnnnnnnnnnnnnnnnnnnnnnnnnnnnnnnnnnnnnnnnnnnnnnnnnnnnnnnnnnnnnnnnnnnnnnnnnnnnnnnnnnnnnnnnnnnnnnnnnnnnnnnnnnnnnnnnnnnnnnnnnnnnnnnnnnnnnnnnnnnnnnnnnnnnnnnnnnnnnnnnnnnnnnnnnnnnnnnnnnnnnnnnnnnnnnnnnnnnnnnnnnnnnnnnnnnnnnnnnnnnnnnnnnnnnnnnnnnnnnnnnnnnnnnnnnnnnnnnnnnnnnnnnnnnnnnnnnnnnnnnnnnnnnnnnnnnnnnnnnnnnnnnnnnnnnnnnnnnnnnnnnnnnnnnnnnnnnnnnnnnnnnnnnnnnnnnnnnnnnnnnnnnnnnnnnnnnnnnnnnnnnnnnnnnnnnnnnnnnnnnnnnnnnnnnnnnnnnnnnnnnnnnnnnnnnnnnnnnnnnnnnnnnnnnnnnnnnnnnnnnnnnnnnnnnnnnnnnnnnnnnnnnnnnnnnnnnnnnnnnnnnnnnnnnnnnnnnnnnnnnnnnnnnnnnnnnnnnnnnnnnnnnnnnnnnnnnnnnnnnnnnnnnnnnnnnnnnnnnnnnnnnnnnnnnnnnnnnnnnnnnnnnnnnnnnnnnnnnnnnnnnnnnnnnnnnnnnnnnnnnnnnnnnnnnnnnnnnnnnnnnnnnnnnnnnnnnnnnnnnnnnnnnnnnnnnnnnnnnnnnnnnnnnnnnnnnnnnnnnnnnnnnnnnnnnnnnnnnnnnnnnnnnnnnnnnnnnnnnnnnnnnnnnnnnnnnnnnnnnnnnnnnnnnnnnnnnnnnnnnnnnnnnnnnnnnnnnnnnnnnnnnnnnnnnnnnnnnnnnnnnnnnnnnnnnnnnnnnnnnnnnnnnnnnnnnnnnnnnnnnnnnnnnnnnnnnnnnnnnnnnnnnnnnnnnnnnnnnnnnnnnnnnnnnnnnnnnnnnnnnnnnnnnnnnnnnnnnnnnnnnnnnnnnnnnnnnnnnnnnnnnnnnnnnnnnnnnnnnnnnnnnnnnnnnnnnnnnnnnnnnnnnnnnnnnnnnnnnnnnnnnnnnnnnnnnnnnnnnnnnnnnnnnnnnnnnnnnnnnnnnnnnnnnnnnnnnnnnnnnnnnnnnnnnnnnnnnnnnnnnnnnnnnnnnnnnnnnnnnnnnnnnnnnnnnnnnnnnnnnnnnnnnnnnnnnnnnnnnnnnnnnnnnnnnnnnnnnnnnnnnnnnnnnnnnnnnnnnnnnnnnnnnnnnnnnnnnnnnnnnnnnnnnnnnnnnnnnnnnnnnnnnnnnnnnnnnnnnnnnnnnnnnnnnnnnnnnnnnnnnnnnnnnnnnnnnnnnnnnnnnnnnnnnnnnnnnnnnnnnnnnnnnnnnnnnnnnnnnnnnnnnnnnnnnnnnnnnnnnnnnnnnnnnnnnnnnnnnnnnnnnnnnnnnnnnnnnnnnnnnnnnnnnnnnnnnnnnnnnnnnnnnnnnnnnnnnnnnnnnnnnnnnnnnnnnnnnnnnnnnnnnnnnnnnnnnnnnnnnnnnnnnnnnnnnnnnnnnnnnnnnnnnnnnnnnnnnnnnnnnnnnnnnnnnnnnnnnnnnnnnnnnnnnnnnnnnnnnnnnnnnnnnnnnnnnnnnnnnnnnnnnnnnnnnnnnnnnnnnnnnnnnnnnnnnnnnnnnnnnnnnnnnnnnnnnnnnnnnnnnnnnnnnnnnnnnnnnnnnnnnnnnnnnnnnnnnnnnnnnnnnnnnnnnnnnnnnnnnnnnnnnnnnnnnnnnnnnnnnnnnnnnnnnnnnnnnnnnnnnnnnnnnnnnnnnnnnnnnnnnnnnnnnnnnnnnnnnnnnnnnnnnnnnnnnnnnnnnnnnnnnnnnnnnnnnnnnnnnnnnnnnnnnnnnnnnnnnnnnnnnnnnnnnnnnnnnnnnnnnnnnnnnnnnnnnnnnnnnnnnnnnnnnnnnnnnnnnnnnnnnnnnnnnnnnnnnnnnnnnnnnnnnnnnnnnnnnnnnnnnnnnnnnnnnnnnnnnnnnnnnnnnnnnnnnnnnnnnnnnnnnnnnnnnnnnnnnnnnnnnnnnnnnnnnnnnnnnnnnnnnnnnnnnnnnnnnnnnnnnnnnnnnnnnnnnnnnnnnnnnnnnnnnnnnnnnnnnnnnnnnnnnnnnnnnnnnnnnnnnnnnnnnnnnnnnnnnnnnnnnnnnnnnnnnnnnnnnnnnnnnnnnnnnnnnnnnnnnnnnnnnnnnnnnnnnnnnnnnnnnnnnnnnnnnnnnnnnnnnnnnnnnnnnnnnnnnnnnnnnnnnnnnnnnnnnnnnnnnnnnnnnnnnnnnnnnnnnnnnnnnnnnnnnnnnnnnnnnnnnnnnnnnnnnnnnnnnnnnnnnnnnnnnnnnnnnnnnnnnnnnnnnnnnnnnnnnnnnnnnnnnnnnnnnnnnnnnnnnnnnnnnnnnnnnnnnnnnnnnnnnnnnnnnnnnnnnnnnnnnnnnnnnnnnnnnnnnnnnnnnnnnnnnnnnnnnnnnnnnnnnnnnnnnnnnnnnnnnnnnnnnnnnnnnnnnnnnnnnnnnnnnnnnnnnnnnnnnnnnnnnnnnnnnnnnnnnnnnnnnnnnnnnnnnnnnnnnnnnnnnnnnnnnnnnnnnnnnnnnnnnnnnnnnnnnnnnnnnnnnnnnnnnnnnnnnnnnnnnnnnnnnnnnnnnnnnnnnnnnnnnnnnnnnnnnnnnnnnnnnnnnnnnnnnnnnnnnnnnnnnnnnnnnnnnnnnnnnnnnnnnnnnnnnnnnnnnnnnnnnnnnnnnnnnnnnnnnnnnnnnnnnnnnnnnnnnnnnnnnnnnnnnnnnnnnnnnnnnnnnnnnnnnnnnnnnnnnnnnnnnnnnnnnnnnnnnnnnnnnnnnnnnnnnnnnnnnnnnnnnnnnnnnnnnnnnnnnnnnnnnnnnnnnnnnnnnnnnnnnnnnnnnnnnnnnnnnnnnnnnnnnnnnnnnnnnnnnnnnnnnnnnnnnnnnnnnnnnnnnnnnnnnnnnnnnnnnnnnnnnnnnnnnnnnnnnnnnnnnnnnnnnnnnnnnnnnnnnnnnnnnnnnnnnnnnnnnnnnnnnnnnnnnnnnnnnnnnnnnnnnnnnnnnnnnnnnnnnnnnnnnnnnnnnnnnnnnnnnnnnnnnnnnnnnnnnnnnnnnnnnnnnnnnnnnnnnnnnnnnnnnnnnnnnnnnnnnnnnnnnnnnnnnnnnnnnnnnnnnnnnnnnnnnnnnnnnnnnnnnnnnnnnnnnnnnnnnnnnnnnnnnnnnnnnnnnnnnnnnnnnnnnnnnnnnnnnnnnnnnnnnnnnnnnnnnnnnnnnnnnnnnnnnnnnnnnnnnnnnnnnnnnnnnnnnnnnnnnnnnnnnnnnnnnnnnnnnnnnnnnnnnnnnnnnnnnnnnnnnnnnnnnnnnnnnnnnnnnnnnnnnnnnnnnnnnnnnnnnnnnnnnnnnnnnnnnnnnnnnnnnnnnnnnnnnnnnnnnnnnnnnnnnnnnnnnnnnnnnnnnnnnnnnnnnnnnnnnnnnnnnnnnnnnnnnnnnnnnnnnnnnnnnnnnnnnnnnnnnnnnnnnnnnnnnnnnnnnnnnnnnnnnnnnnnnnnnnnnnnnnnnnnnnnnnnnnnnnnnnnnnnnnnnnnnnnnnnnnnnnnnnnnnnnnnnnnnnnnnnnnnnnnnnnnnnnnnnnnnnnnnnnnnnnnnnnnnnnnnnnnnnnnnnnnnnnnnnnnnnnnnnnnnnnnnnnnnnnnnnnnnnnnnnnnnnnnnnnnnnnnnnnnnnnnnnnnnnnnnnnnnnnnnnnnnnnnnnnnnnnnnnnnnnnnnnnnnnnnnnnnnnnnnnnnnnnnnnnnnnnnnnnnnnnnnnnnnnnnnnnnnnnnnnnnnnnnnnnnnnnnnnnnnnnnnnnnnnnnnnnnnnnnnnnnnnnnnnnnnnnnnnnnnnnnnnnnnnnnnnnnnnnnnnnnnnnnnnnnnnnnnnnnnnnnnnnnnnnnnnnnnnnnnnnnnnnnnnnnnnnnnnnnnnnnnnnnnnnnnnnnnnnnnnnnnnnnnnnnnnnnnnnnnnnnnnnnnnnnnnnnnnnnnnnnnnnnnnnnnnnnnnnnnnnnnnnnnnnnnnnnnnnnnnnnnnnnnnnnnnnnnnnnnnnnnnnnnnnnnnnnnnnnnnnnnnnnnnnnnnnnnnnnnnnnnnnnnnnnnnnnnnnnnnnnnnnnnnnnnnnnnnnnnnnnnnnnnnnnnnnnnnnnnnnnnnnnnnnnnnnnnnnnnnnnnnnnnnnnnnnnnnnnnnnnnnnnnnnnnnnnnnnnnnnnnnnnnnnnnnnnnnnnnnnnnnnnnnnnnnnnnnnnnnnnnnnnnnnnnnnnnnnnnnnnnnnnnnnnnnnnnnnnnnnnnnnnnnnnnnnnnnnnnnnnnnnnnnnnnnnnnnnnnnnnnnnnnnnnnnnnnnnnnnnnnnnnnnnnnnnnnnnnnnnnnnnnnnnnnnnnnnnnnnnnnnnnnnnnnnnnnnnnnnnnnnnnnnnnnnnnnnnnnnnnnnnnnnnnnnnnnnnnnnnnnnnnnnnnnnnnnnnnnnnnnnnnnnnnnnnnnnnnnnnnnnnnnnnnnnnnnnnnnnnnnnnnnnnnnnnnnnnnnnnnnnnnnnnnnnnnnnnnnnnnnnnnnnnnnnnnnnnnnnnnnnnnnnnnnnnnnnnnnnnnnnnnnnnnnnnnnnnnnnnnnnnnnnnnnnnnnnnnnnnnnnnnnnnnnnnnnnnnnnnnnnnnnnnnnnnnnnnnnnnnnnnnnnnnnnnnnnnnnnnnnnnnnnnnnnnnnnnnnnnnnnnnnnnnnnnnnnnnnnnnnnnnnnnnnnnnnnnnnnnnnnnnnnnnnnnnnnnnnnnnnnnnnnnnnnnnnnnnnnnnnnnnnnnnnnnnnnnnnnnnnnnnnnnnnnnnnnnnnnnnnnnnnnnnnnnnnnnnnnnnnnnnnnnnnnnnnnnnnnnnnnnnnnnnnnnnnnnnnnnnnnnnnnnnnnnnnnnnnnnnnnnnnnnnnnnnnnnnnnnnnnnnnnnnnnnnnnnnnnnnnnnnnnnnnnnnnnnnnnnnnnnnnnnnnnnnnnnnnnnnnnnnnnnnnnnnnnnnnnnnnnnnnnnnnnnnnnnnnnnnnnnnnnnnnnnnnnnnnnnnnnnnnnnnnnnnnnnnnnnnnnnnnnnnnnnnnnnnnnnnnnnnnnnnnnnnnnnnnnnnnnnnnnnnnnnnnnnnnnnnnnnnnnnnnnnnnnnnnnnnnnnnnnnnnnnnnnnnnnnnnnnnnnnnnnnnnnnnnnnnnnnnnnnnnnnnnnnnnnnnnnnnnnnnnnnnnnnnnnnnnnnnnnnnnnnnnnnnnnnnnnnnnnnnnnnnnnnnnnnnnnnnnnnnnnnnnnnnnnnnnnnnnnnnnnnnnnnnnnnnnnnnnnnnnnnnnnnnnnnnnnnnnnnnnnnnnnnnnnnnnnnnnnnnnnnnnnnnnnnnnnnnnnnnnnnnnnnnnnnnnnnnnnnnnnnnnnnnnnnnnnnnnnnnnnnnnnnnnnnnnnnnnnnnnnnnnnnnnnnnnnnnnnnnnnnnnnnnnnnnnnnnnnnnnnnnnnnnnnnnnnnnnnnnnnnnnnnnnnnnnnnnnnnnnnnnnnnnnnnnnnnnnnnnnnnnnnnnnnnnnnnnnnnnnnnnnnnnnnnnnnnnnnnnnnnnnnnnnnnnnnnnnnnnnnnnnnnnnnnnnnnnnnnnnnnnnnnnnnnnnnnnnnnnnnnnnnnnnnnnnnnnnnnnnnnnnnnnnnnnnnnnnnnnnnnnnnnnnnnnnnnnnnnnnnnnnnnnnnnnnnnnnnnnnnnnnnnnnnnnnnnnnnnnnnnnnnnnnnnnnnnnnnnnnnnnnnnnnnnnnnnnnnnnnnnnnnnnnnnnnnnnnnnnnnnnnnnnnnnnnnnnnnnnnnnnnnnnnnnnnnnnnnnnnnnnnnnnnnnnnnnnnnnnnnnnnnnnnnnnnnnnnnnnnnnnnnnnnnnnnnnnnnnnnnnnnnnnnnnnnnnnnnnnnnnnnnnnnnnnnnnnnnnnnnnnnnnnnnnnnnnnnnnnnnnnnnnnnnnnnnnnnnnnnnnnnnnnnnnnnnnnnnnnnnnnnnnnnnnnnnnnnnnnnnnnnnnnnnnnnnnnnnnnnnnnnnnnnnnnnnnnnnnnnnnnnnnnnnnnnnnnnnnnnnnnnnnnnnnnnnnnnnnnnnnnnnnnnnnnnnnnnnnnnnnnnnnnnnnnnnnnnnnnnnnnnnnnnnnnnnnnnnnnnnnnnnnnnnnnnnnnnnnnnnnnnnnnnnnnnnnnnnnnnnnnnnnnnnnnnnnnnnnnnnnnnnnnnnnnnnnnnnnnnnnnnnnnnnnnnnnnnnnnnnnnnnnnnnnnnnnnnnnnnnnnnnnnnnnnnnnnnnnnnnnnnnnnnnnnnnnnnnnnnnnnnnnnnnnnnnnnnnnnnnnnnnnnnnnnnnnnnnnnnnnnnnnnnnnnnnnnnnnnnnnnnnnnnnnnnnnnnnnnnnnnnnnnnnnnnnnnnnnnnnnnnnnnnnnnnnnnnnnnnnnnnnnnnnnnnnnnnnnnnnnnnnnnnnnnnnnnnnnnnnnnnnnnnnnnnnnnnnnnnnnnnnnnnnnnnnnnnnnnnnnnnnnnnnnnnnnnnnnnnnnnnnnnnnnnnnnnnnnnnnnnnnnnnnnnnnnnnnnnnnnnnnnnnnnnnnnnnnnnnnnnnnnnnnnnnnnnnnnnnnnnnnnnnnnnnnnnnnnnnnnnnnnnnnnnnnnnnnnnnnnnnnnnnnnnnnnnnnnnnnnnnnnnnnnnnnnnnnnnnnnnnnnnnnnnnnnnnnnnnnnnnnnnnnnnnnnnnnnnnnnnnnnnnnnnnnnnnnnnnnnnnnnnnnnnnnnnnnnnnnnnnnnnnnnnnnnnnnnnnnnnnnnnnnnnnnnnnnnnnnnnnnnnnnnnnnnnnnnnnnnnnnnnnnnnnnnnnnnnnnnnnnnnnnnnnnnnnnnnnnnnnnnnnnnnnnnnnnnnnnnnnnnnnnnnnnnnnnnnnnnnnnnnnnnnnnnnnnnnnnnnnnnnnnnnnnnnnnnnnnnnnnnnnnnnnnnnnnnnnnnnnnnnnnnnnnnnnnnnnnnnnnnnnnnnnnnnnnnnnnnnnnnnnnnnnnnnnnnnnnnnnnnnnnnnnnnnnnnnnnnnnnnnnnnnnnnnnnnnnnnnnnnnnnnnnnnnnnnnnnnnnnnnnnnnnnnnnnnnnnnnnnnnnnnnnnnnnnnnnnnnnnnnnnnnnnnnnnnnnnnnnnnnnnnnnnnnnnnnnnnnnnnnnnnnnnnnnnnnnnnnnnnnnnnnnnnnnnnnnnnnnnnnnnnnnnnnnnnnnnnnnnnnnnnnnnnnnnnnnnnnnnnnnnnnnnnnnnnnnnnnnnnnnnnnnnnnnnnnnnnnnnnnnnnnnnnnnnnnnnnnnnnnnnnnnnnnnnnnnnnnnnnnnnnnnnnnnnnnnnnnnnnnnnnnnnnnnnnnnnnnnnnnnnnnnnnnnnnnnnnnnnnnnnnnnnnnnnnnnnnnnnnnnnnnnnnnnnnnnnnnnnnnnnnnnnnnnnnnnnnnnnnnnnnnnnnnnnnnnnnnnnnnnnnnnnnnnnnnnnnnnnnnnnnnnnnnnnnnnnnnnnnnnnnnnnnnnnnnnnnnnnnnnnnnnnnnnnnnnnnnnnnnnnnnnnnnnnnnnnnnnnnnnnnnnnnnnnnnnnnnnnnnnnnnnnnnnnnnnnnnnnnnnnnnnnnnnnnnnnnnnnnnnnnnnnnnnnnnnnnnnnnnnnnnnnnnnnnnnnnnnnnnnnnnnnnnnnnnnnnnnnnnnnnnnnnnnnnnnnnnnnnnnnnnnnnnnnnnnnnnnnnnnnnnnnnnnnnnnnnnnnnnnnnnnnnnnnnnnnnnnnnnnnnnnnnnnnnnnnnnnnnnnnnnnnnnnnnnnnnnnnnnnnnnnnnnnnnnnnnnnnnnnnnnnnnnnnnnnnnnnnnnnnnnnnnnnnnnnnnnnnnnnnnnnnnnnnnnnnnnnnnnnnnnnnnnnnnnnnnnnnnnnnnnnnnnnnnnnnnnnnnnnnnnnnnnnnnnnnnnnnnnnnnnnnnnnnnnnnnnnnnnnnnnnnnnnnnnnnnnnnnnnnnnnnnnnnnnnnnnnnnnnnnnnnnnnnnnnnnnnnnnnnnnnnnnnnnnnnnnnnnnnnnnnnnnnnnnnnnnnnnnnnnnnnnnnnnnnnnnnnnnnnnnnnnnnnnnnnnnnnnnnnnnnnnnnnnnnnnnnnnnnnnnnnnnnnnnnnnnnnnnnnnnnnnnnnnnnnnnnnnnnnnnnnnnnnnnnnnnnnnnnnnnnnnnnnnnnnnnnnnnnnnnnnnnnnnnnnnnnnnnnnnnnnnnnnnnnnnnnnnnnnnnnnnnnnnnnnnnnnnnnnnnnnnnnnnnnnnnnnnnnnnnnnnnnnnnnnnnnnnnnnnnnnnnnnnnnnnnnnnnnnnnnnnnnnnnnnnnnnnnnnnnnnnnnnnnnnnnnnnnnnnnnnnnnnnnnnnnnnnnnnnnnnnnnnnnnnnnnnnnnnnnnnnnnnnnnnnnnnnnnnnnnnnnnnnnnnnnnnnnnnnnnnnnnnnnnnnnnnnnnnnnnnnnnnnnnnnnnnnnnnnnnnnnnnnnnnnnnnnnnnnnnnnnnnnnnnnnnnnnnnnnnnnnnnnnnnnnnnnnnnnnnnnnnnnnnnnnnnnnnnnnnnnnnnnnnnnnnnnnnnnnnnnnnnnnnnnnnnnnnnnnnnnnnnnnnnnnnnnnnnnnnnnnnnnnnnnnnnnnnnnnnnnnnnnnnnnnnnnnnnnnnnnnnnnnnnnnnnnnnnnnnnnnnnnnnnnnnnnnnnnnnnnnnnnnnnnnnnnnnnnnnnnnnnnnnnnnnnnnnnnnnnnnnnnnnnnnnnnnnnnnnnnnnnnnnnnnnnnnnnnnnnnnnnnnnnnnnnnnnnnnnnnnnnnnnnnnnnnnnnnnnnnnnnnnnnnnnnnnnnnnnnnnnnnnnnnnnnnnnnnnnnnnnnnnnnnnnnnnnnnnnnnnnnnnnnnnnnnnnnnnnnnnnnnnnnnnnnnnnnnnnnnnnnnnnnnnnnnnnnnnnnnnnnnnnnnnnnnnnnnnnnnnnnnnnnnnnnnnnnnnnnnnnnnnnnnnnnnnnnnnnnnnnnnnnnnnnnnnnnnnnnnnnnnnnnnnnnnnnnnnnnnnnnnnnnnnnnnnnnnnnnnnnnnnnnnnnnnnnnnnnnnnnnnnnnnnnnnnnnnnnnnnnnnnnnnnnnnnnnnnnnnnnnnnnnnnnnnnnnnnnnnnnnnnnnnnnnnnnnnnnnnnnnnnnnnnnnnnnnnnnnnnnnnnnnnnnnnnnnnnnnnnnnnnnnnnnnnnnnnnnnnnnnnnnnnnnnnnnnnnnnnnnnnnnnnnnnnnnnnnnnnnnnnnnnnnnnnnnnnnnnnnnnnnnnnnnnnnnnnnnnnnnnnnnnnnnnnnnnnnnnnnnnnnnnnnnnnnnnnnnnnnnnnnnnnnnnnnnnnnnnnnnnnnnnnnnnnnnnnnnnnnnnnnnnnnnnnnnnnnnnnnnnnnnnnnnnnnnnnnnnnnnnnnnnnnnnnnnnnnnnnnnnnnnnnnnnnnnnnnnnnnnnnnnnnnnnnnnnnnnnnnnnnnnnnnnnnnnnnnnnnnnnnnnnnnnnnnnnnnnnnnnnnnnnnnnnnnnnnnnnnnnnnnnnnnnnnnnnnnnnnnnnnnnnnnnnnnnnnnnnnnnnnnnnnnnnnnnnnnnnnnnnnnnnnnnnnnnnnnnnnnnnnnnnnnnnnnnnnnnnnnnnnnnnnnnnnnnnnnnnnnnnnnnnnnnnnnnnnnnnnnnnnnnnnnnnnnnnnnnnnnnnnnnnnnnnnnnnnnnnnnnnnnnnnnnnnnnnnnnnnnnnnnnnnnnnnnnnnnnnnnnnnnnnnnnnnnnnnnnnnnnnnnnnnnnnnnnnnnnnnnnnnnnnnnnnnnnnnnnnnnnnnnnnnnnnnnnnnnnnnnnnnnnnnnnnnnnnnnnnnnnnnnnnnnnnnnnnnnnnnnnnnnnnnnnnnnnnnnnnnnnnnnnnnnnnnnnnnnnnnnnnnnnnnnnnnnnnnnnnnnnnnnnnnnnnnnnnnnnnnnnnnnnnnnnnnnnnnnnnnnnnnnnnnnnnnnnnnnnnnnnnnnnnnnnnnnnnnnnnnnnnnnnnnnnnnnnnnnnnnnnnnnnnnnnnnnnnnnnnnnnnnnnnnnnnnnnnnnnnnnnnnnnnnnnnnnnnnnnnnnnnnnnnnnnnnnnnnnnnnnnnnnnnnnnnnnnnnnnnnnnnnnnnnnnnnnnnnnnnnnnnnnnnnnnnnnnnnnnnnnnnnnnnnnnnnnnnnnnnnnnnnnnnnnnnnnnnnnnnnnnnnnnnnnnnnnnnnnnnnnnnnnnnnnnnnnnnnnnnnnnnnnnnnnnnnnnnnnnnnnnnnnnnnnnnnnnnnnnnnnnnnnnnnnnnnnnnnnnnnnnnnnnnnnnnnnnnnnnnnnnnnnnnnnnnnnnnnnnnnnnnnnnnnnnnnnnnnnnnnnnnnnnnnnnnnnnnnnnnnnnnnnnnnnnnnnnnnnnnnnnnnnnnnnnnnnnnnnnnnnnnnnnnnnnnnnnnnnnnnnnnnnnnnnnnnnnnnnnnnnnnnnnnnnnnnnnnnnnnnnnnnnnnnnnnnnnnnnnnnnnnnnnnnnnnnnnnnnnnnnnnnnnnnnnnnnnnnnnnnnnnnnnnnnnnnnnnnnnnnnnnnnnnnnnnnnnnnnnnnnnnnnnnnnnnnnnnnnnnnnnnnnnnnnnnnnnnnnnnnnnnnnnnnnnnnnnnnnnnnnnnnnnnnnnnnnnnnnnnnnnnnnnnnnnnnnnnnnnnnnnnnnnnnnnnnnnnnnnnnnnnnnnnnnnnnnnnnnnnnnnnnnnnnnnnnnnnnnnnnnnnnnnnnnnnnnnnnnnnnnnnnnnnnnnnnnnnnnnnnnnnnnnnnnnnnnnnnnnnnnnnnnnnnnnnnnnnnnnnnnnnnnnnnnnnnnnnnnnnnnnnnnnnnnnnnnnnnnnnnnnnnnnnnnnnnnnnnnnnnnnnnnnnnnnnnnnnnnnnnnnnnnnnnnnnnnnnnnnnnnnnnnnnnnnnnnnnnnnnnnnnnnnnnnnnnnnnnnnnnnnnnnnnnnnnnnnnnnnnnnnnnnnnnnnnnnnnnnnnnnnnnnnnnnnnnnnnnnnnnnnnnnnnnnnnnnnnnnnnnnnnnnnnnnnnnnnnnnnnnnnnnnnnnnnnnnnnnnnnnnnnnnnnnnnnnnnnnnnnnnnnnnnnnnnnnnnnnnnnnnnnnnnnnnnnnnnnnnnnnnnnnnnnnnnnnnnnnnnnnnnnnnnnnnnnnnnnnnnnnnnnnnnnnnnnnnnnnnnnnnnnnnnnnnnnnnnnnnnnnnnnnnnnnnnnnnnnnnnnnnnnnnnnnnnnnnnnnnnnnnnnnnnnnnnnnnnnnnnnnnnnnnnnnnnnnnnnnnnnnnnnnnnnnnnnnnnnnnnnnnnnnnnnnnnnnnnnnnnnnnnnnnnnnnnnnnnnnnnnnnnnnnnnnnnnnnnnnnnnnnnnnnnnnnnnnnnnnnnnnnnnnnnnnnnnnnnnnnnnnnnnnnnnnnnnnnnnnnnnnnnnnnnnnnnnnnnnnnnnnnnnnnnnnnnnnnnnnnnnnnnnnnnnnnnnnnnnnnnnnnnnnnnnnnnnnnnnnnnnnnnnnnnnnnnnnnnnnnnnnnnnnnnnnnnnnnnnnnnnnnnnnnnnnnnnnnnnnnnnnnnnnnnnnnnnnnnnnnnnnnnnnnnnnnnnnnnnnnnnnnnnnnnnnnnnnnnnnnnnnnnnnnnnnnnnnnnnnnnnnnnnnnnnnnnnnnnnnnnnnnnnnnnnnnnnnnnnnnnnnnnnnnnnnnnnnnnnnnnnnnnnnnnnnnnnnnnnnnnnnnnnnnnnnnnnnnnnnnnnnnnnnnnnnnnnnnnnnnnnnnnnnnnnnnnnnnnnnnnnnnnnnnnnnnnnnnnnnnnnnnnnnnnnnnnnnnnnnnnnnnnnnnnnnnnnnnnnnnnnnnnnnnnnnnnnnnnnnnnnnnnnnnnnnnnnnnnnnnnnnnnnnnnnnnnnnnnnnnnnnnnnnnnnnnnnnnnnnnnnnnnnnnnnnnnnnnnnnnnnnnnnnnnnnnnnnnnnnnnnnnnnnnnnnnnnnnnnnnnnnnnnnnnnnnnnnnnnnnnnnnnnnnnnnnnnnnnnnnnnnnnnnnnnnnnnnnnnnnnnnnnnnnnnnnnnnnnnnnnnnnnnnnnnnnnnnnnnnnnnnnnnnnnnnnnnnnnnnnnnnnnnnnnnnnnnnnnnnnnnnnnnnnnnnnnnnnnnnnnnnnnnnnnnnnnnnnnnnnnnnnnnnnnnnnnnnnnnnnnnnnnnnnnnnnnnnnnnnnnnnnnnnnnnnnnnnnnnnnnnnnnnnnnnnnnnnnnnnnnnnnnnnnnnnnnnnnnnnnnnnnnnnnnnnnnnnnnnnnnnnnnnnnnnnnnnnnnnnnnnnnnnnnnnnnnnnnnnnnnnnnnnnnnnnnnnnnnnnnnnnnnnnnnnnnnnnnnnnnnnnnnnnnnnnnnnnnnnnnnnnnnnnnnnnnnnnnnnnnnnnnnnnnnnnnnnnnnnnnnnnnnnnnnnnnnnnnnnnnnnnnnnnnnnnnnnnnnnnnnnnnnnnnnnnnnnnnnnnnnnnnnnnnnnnnnnnnnnnnnnnnnnnnnnnnnnnnnnnnnnnnnnnnnnnnnnnnnnnnnnnnnnnnnnnnnnnnnnnnnnnnnnnnnnnnnnnnnnnnnnnnnnnnnnnnnnnnnnnnnnnnnnnnnnnnnnnnnnnnnnnnnnnnnnnnnnnnnnnnnnnnnnnnnnnnnnnnnnnnnnnnnnnnnnnnnnnnnnnnnnnnnnnnnnnnnnnnnnnnnnnnnnnnnnnnnnnnnnnnnnnnnnnnnnnnnnnnnnnnnnnnnnnnnnnnnnnnnnnnnnnnnnnnnnnnnnnnnnnnnnnnnnnnnnnnnnnnnnnnnnnnnnnnnnnnnnnnnnnnnnnnnnnnnnnnnnnnnnnnnnnnnnnnnnnnnnnnnnnnnnnnnnnnnnnnnnnnnnnnnnnnnnnnnnnnnnnnnnnnnnnnnnnnnnnnnnnnnnnnnnnnnnnnnnnnnnnnnnnnnnnnnnnnnnnnnnnnnnnnnnnnnnnnnnnnnnnnnnnnnnnnnnnnnnnnnnnnnnnnnnnnnnnnnnnnnnnnnnnnnnnnnnnnnnnnnnnnnnnnnnnnnnnnnnnnnnnnnnnnnnnnnnnnnnnnnnnnnnnnnnnnnnnnnnnnnnnnnnnnnnnnnnnnnnnnnnnnnnnnnnnnnnnnnnnnnnnnnnnnnnnnnnnnnnnnnnnnnnnnnnnnnnnnnnnnnnnnnnnnnnnnnnnnnnnnnnnnnnnnnnnnnnnnnnnnnnnnnnnnnnnnnnnnnnnnnnnnnnnnnnnnnnnnnnnnnnnnnnnnnnnnnnnnnnnnnnnnnnnnnnnnnnnnnnnnnnnnnnnnnnnnnnnnnnnnnnnnnnnnnnnnnnnnnnnnnnnnnnnnnnnnnnnnnnnnnnnnnnnnnnnnnnnnnnnnnnnnnnnnnnnnnnnnnnnnnnnnnnnnnnnnnnnnnnnnnnnnnnnnnnnnnnnnnnnnnnnnnnnnnnnnnnnnnnnnnnnnnnnnnnnnnnnnnnnnnnnnnnnnnnnnnnnnnnnnnnnnnnnnnnnnnnnnnnnnnnnnnnnnnnnnnnnnnnnnnnnnnnnnnnnnnnnnnnnnnnnnnnnnnnnnnnnnnnnnnnnnnnnnnnnnnnnnnnnnnnnnnnnnnnnnnnnnnnnnnnnnnnnnnnnnnnnnnnnnnnnnnnnnnnnnnnnnnnnnnnnnnnnnnnnnnnnnnnnnnnnnnnnnnnnnnnnnnnnnnnnnnnnnnnnnnnnnnnnnnnnnnnnnnnnnnnnnnnnnnnnnnnnnnnnnnnnnnnnnnnnnnnnnnnnnnnnnnnnnnnnnnnnnnnnnnnnnnnnnnnnnnnnnnnnnnnnnnnnnnnnnnnnnnnnnnnnnnnnnnnnnnnnnnnnnnnnnnnnnnnnnnnnnnnnnnnnnnnnnnnnnnnnnnnnnnnnnnnnnnnnnnnnnnnnnnnnnnnnnnnnnnnnnnnnnnnnnnnnnnnnnnnnnnnnnnnnnnnnnnnnnnnnnnnnnnnnnnnnnnnnnnnnnnnnnnnnnnnnnnnnnnnnnnnnnnnnnnnnnnnnnnnnnnnnnnnnnnnnnnnnnnnnnnnnnnnnnnnnnnnnnnnnnnnnnnnnnnnnnnnnnnnnnnnnnnnnnnnnnnnnnnnnnnnnnnnnnnnnnnnnnnnnnnnnnnnnnnnnnnnnnnnnnnnnnnnnnnnnnnnnnnnnnnnnnnnnnnnnnnnnnnnnnnnnnnnnnnnnnnnnnnnnnnnnnnnnnnnnnnnnnnnnnnnnnnnnnnnnnnnnnnnnnnnnnnnnnnnnnnnnnnnnnnnnnnnnnnnnnnnnnnnnnnnnnnnnnnnnnnnnnnnnnnnnnnnnnnnnnnnnnnnnnnnnnnnnnnnnnnnnnnnnnnnnnnnnnnnnnnnnnnnnnnnnnnnnnnnnnnnnnnnnnnnnnnnnnnnnnnnnnnnnnnnnnnnnnnnnnnnnnnnnnnnnnnnnnnnnnnnnnnnnnnnnnnnnnnnnnnnnnnnnnnnnnnnnnnnnnnnnnnnnnnnnnnnnnnnnnnnnnnnnnnnnnnnnnnnnnnnnnnnnnnnnnnnnnnnnnnnnnnnnnnnnnnnnnnnnnnnnnnnnnnnnnnnnnnnnnnnnnnnnnnnnnnnnnnnnnnnnnnnnnnnnnnnnnnnnnnnnnnnnnnnnnnnnnnnnnnnnnnnnnnnnnnnnnnnnnnnnnnnnnnnnnnnnnnnnnnnnnnnnnnnnnnnnnnnnnnnnnnnnnnnnnnnnnnnnnnnnnnnnnnnnnnnnnnnnnnnnnnnnnnnnnnnnnnnnnnnnnnnnnnnnnnnnnnnnnnnnnnnnnnnnnnnnnnnnnnnnnnnnnnnnnnnnnnnnnnnnnnnnnnnnnnnnnnnnnnnnnnnnnnnnnnnnnnnnnnnnnnnnnnnnnnnnnnnnnnnnnnnnnnnnnnnnnnnnnnnnnnnnnnnnnnnnnnnnnnnnnnnnnnnnnnnnnnnnnnnnnnnnnnnnnnnnnnnnnnnnnnnnnnnnnnnnnnnnnnnnnnnnnnnnnnnnnnnnnnnnnnnnnnnnnnnnnnnnnnnnnnnnnnnnnnnnnnnnnnnnnnnnnnnnnnnnnnnnnnnnnnnnnnnnnnnnnnnnnnnnnnnnnnnnnnnnnnnnnnnnnnnnnnnnnnnnnnnnnnnnnnnnnnnnnnnnnnnnnnnnnnnnnnnnnnnnnnnnnnnnnnnnnnnnnnnnnnnnnnnnnnnnnnnnnnnnnnnnnnnnnnnnnnnnnnnnnnnnnnnnnnnnnnnnnnnnnnnnnnnnnnnnnnnnnnnnnnnnnnnnnnnnnnnnnnnnnnnnnnnnnnnnnnnnnnnnnnnnnnnnnnnnnnnnnnnnnnnnnnnnnnnnnnnnnnnnnnnnnnnnnnnnnnnnnnnnnnnnnnnnnnnnnnnnnnnnnnnnnnnnnnnnnnnnnnnnnnnnnnnnnnnnnnnnnnnnnnnnnnnnnnnnnnnnnnnnnnnnnnnnnnnnnnnnnnnnnnnnnnnnnnnnnnnnnnnnnnnnnnnnnnnnnnnnnnnnnnnnnnnnnnnnnnnnnnnnnnnnnnnnnnnnnnnnnnnnnnnnnnnnnnnnnnnnnnnnnnnnnnnnnnnnnnnnnnnnnnnnnnnnnnnnnnnnnnnnnnnnnnnnnnnnnnnnnnnnnnnnnnnnnnnnnnnnnnnnnnnnnnnnnnnnnnnnnnnnnnnnnnnnnnnnnnnnnnnnnnnnnnnnnnnnnnnnnnnnnnnnnnnnnnnnnnnnnnnnnnnnnnnnnnnnnnnnnnnnnnnnnnnnnnnnnnnnnnnnnnnnnnnnnnnnnnnnnnnnnnnnnnnnnnnnnnnnnnnnnnnnnnnnnnnnnnnnnnnnnnnnnnnnnnnnnnnnnnnnnnnnnnnnnnnnnnnnnnnnnnnnnnnnnnnnnnnnnnnnnnnnnnnnnnnnnnnnnnnnnnnnnnnnnnnnnnnnnnnnnnnnnnnnnnnnnnnnnnnnnnnnnnnnnnnnnnnnnnnnnnnnnnnnnnnnnnnnnnnnnnnnnnnnnnnnnnnnnnnnnnnnnnnnnnnnnnnnnnnnnnnnnnnnnnnnnnnnnnnnnnnnnnnnnnnnnnnnnnnnnnnnnnnnnnnnnnnnnnnnnnnnnnnnnnnnnnnnnnnnnnnnnnnnnnnnnnnnnnnnnnnnnnnnnnnnnnnnnnnnnnnnnnnnnnnnnnnnnnnnnnnnnnnnnnnnnnnnnnnnnnnnnnnnnnnnnnnnnnnnnnnnnnnnnnnnnnnnnnnnnnnnnnnnnnnnnnnnnnnnnnnnnnnnnnnnnnnnnnnnnnnnnnnnnnnnnnnnnnnnnnnnnnnnnnnnnnnnnnnnnnnnnnnnnnnnnnnnnnnnnnnnnnnnnnnnnnnnnnnnnnnnnnnnnnnnnnnnnnnnnnnnnnnnnnnnnnnnnnnnnnnnnnnnnnnnnnnnnnnnnnnnnnnnnnnnnnnnnnnnnnnnnnnnnnnnnnnnnnnnnnnnnnnnnnnnnnnnnnnnnnnnnnnnnnnnnnnnnnnnnnnnnnnnnnnnnnnnnnnnnnnnnnnnnnnnnnnnnnnnnnnnnnnnnnnnnnnnnnnnnnnnnnnnnnnnnnnnnnnnnnnnnnnnnnnnnnnnnnnnnnnnnnnnnnnnnnnnnnnnnnnnnnnnnnnnnnnnnnnnnnnnnnnnnnnnnnnnnnnnnnnnnnnnnnnnnnnnnnnnnnnnnnnnnnnnnnnnnnnnnnnnnnnnnnnnnnnnnnnnnnnnnnnnnnnnnnnnnnnnnnnnnnnnnnnnnnnnnnnnnnnnnnnnnnnnnnnnnnnnnnnnnnnnnnnnnnnnnnnnnnnnnnnnnnnnnnnnnnnnnnnnnnnnnnnnnnnnnnnnnnnnnnnnnnnnnnnnnnnnnnnnnnnnnnnnnnnnnnnnnnnnnnnnnnnnnnnnnnnnnnnnnnnnnnnnnnnnnnnnnnnnnnnnnnnnnnnnnnnnnnnnnnnnnnnnnnnnnnnnnnnnnnnnnnnnnnnnnnnnnnnnnnnnnnnnnnnnnnnnnnnnnnnnnnnnnnnnnnnnnnnnnnnnnnnnnnnnnnnnnnnnnnnnnnnnnnnnnnnnnnnnnnnnnnnnnnnnnnnnnnnnnnnnnnnnnnnnnnnnnnnnnnnnnnnnnnnnnnnnnnnnnnnnnnnnnnnnnnnnnnnnnnnnnnnnnnnnnnnnnnnnnnnnnnnnnnnnnnnnnnnnnnnnnnnnnnnnnnnnnnnnnnnnnnnnnnnnnnnnnnnnnnnnnnnnnnnnnnnnnnnnnnnnnnnnnnnnnnnnnnnnnnnnnnnnnnnnnnnnnnnnnnnnnnnnnnnnnnnnnnnnnnnnnnnnnnnnnnnnnnnnnnnnnnnnnnnnnnnnnnnnnnnnnnnnnnnnnnnnnnnnnnnnnnnnnnnnnnnnnnnnnnnnnnnnnnnnnnnnnnnnnnnnnnnnnnnnnnnnnnnnnnnnnnnnnnnnnnnnnnnnnnnnnnnnnnnnnnnnnnnnnnnnnnnnnnnnnnnnnnnnnnnnnnnnnnnnnnnnnnnnnnnnnnnnnnnnnnnnnnnnnnnnnnnnnnnnnnnnnnnnnnnnnnnnnnnnnnnnnnnnnnnnnnnnnnnnnnnnnnnnnnnnnnnnnnnnnnnnnnnnnnnnnnnnnnnnnnnnnnnnnnnnnnnnnnnnnnnnnnnnnnnnnnnnnnnnnnnnnnnnnnnnnnnnnnnnnnnnnnnnnnnnnnnnnnnnnnnnnnnnnnnnnnnnnnnnnnnnnnnnnnnnnnnnnnnnnnnnnnnnnnnnnnnnnnnnnnnnnnnnnnnnnnnnnnnnnnnnnnnnnnnnnnnnnnnnnnnnnnnnnnnnnnnnnnnnnnnnnnnnnnnnnnnnnnnnnnnnnnnnnnnnnnnnnnnnnnnnnnnnnnnnnnnnnnnnnnnnnnnnnnnnnnnnnnnnnnnnnnnnnnnnnnnnnnnnnnnnnnnnnnnnnnnnnnnnnnnnnnnnnnnnnnnnnnnnnnnnnnnnnnnnnnnnnnnnnnnnnnnnnnnnnnnnnnnnnnnnnnnnnnnnnnnnnnnnnnnnnnnnnnnnnnnnnnnnnnnnnnnnnnnnnnnnnnnnnnnnnnnnnnnnnnnnnnnnnnnnnnnnnnnnnnnnnnnnnnnnnnnnnnnnnnnnnnnnnnnnnnnnnnnnnnnnnnnnnnnnnnnnnnnnnnnnnnnnnnnnnnnnnnnnnnnnnnnnnnnnnnnnnnnnnnnnnnnnnnnnnnnnnnnnnnnnnnnnnnnnnnnnnnnnnnnnnnnnnnnnnnnnnnnnnnnnnnnnnnnnnnnnnnnnnnnnnnnnnnnnnnnnnnnnnnnnnnnnnnnnnnnnnnnnnnnnnnnnnnnnnnnnnnnnnnnnnnnnnnnnnnnnnnnnnnnnnnnnnnnnnnnnnnnnnnnnnnnnnnnnnnnnnnnnnnnnnnnnnnnnnnnnnnnnnnnnnnnnnnnnnnnnnnnnnnnnnnnnnnnnnnnnnnnnnnnnnnnnnnnnnnnnnnnnnnnnnnnnnnnnnnnnnnnnnnnnnnnnnnnnnnnnnnnnnnnnnnnnnnnnnnnnnnnnnnnnnnnnnnnnnnnnnnnnnnnnnnnnnnnnnnnnnnnnnnnnnnnnnnnnnnnnnnnnnnnnnnnnnnnnnnnnnnnnnnnnnnnnnnnnnnnnnnnnnnnnnnnnnnnnnnnnnnnnnnnnnnnnnnnnnnnnnnnnnnnnnnnnnnnnnnnnnnnnnnnnnnnnnnnnnnnnnnnnnnnnnnnnnnnnnnnnnnnnnnnnnnnnnnnnnnnnnnnnnnnnnnnnnnnnnnnnnnnnnnnnnnnnnnnnnnnnnnnnnnnnnnnnnnnnnnnnnnnnnnnnnnnnnnnnnnnnnnnnnnnnnnnnnnnnnnnnnnnnnnnnnnnnnnnnnnnnnnnnnnnnnnnnnnnnnnnnnnnnnnnnnnnnnnnnnnnnnnnnnnnnnnnnnnnnnnnnnnnnnnnnnnnnnnnnnnnnnnnnnnnnnnnnnnnnnnnnnnnnnnnnnnnnnnnnnnnnnnnnnnnnnnnnnnnnnnnnnnnnnnnnnnnnnnnnnnnnnnnnnnnnnnnnnnnnnnnnnnnnnnnnnnnnnnnnnnnnnnnnnnnnnnnnnnnnnnnnnnnnnnnnnnnnnnnnnnnnnnnnnnnnnnnnnnnnnnnnnnnnnnnnnnnnnnnnnnnnnnnnnnnnnnnnnnnnnnnnnnnnnnnnnnnnnnnnnnnnnnnnnnnnnnnnnnnnnnnnnnnnnnnnnnnnnnnnnnnnnnnnnnnnnnnnnnnnnnnnnnnnnnnnnnnnnnnnnnnnnnnnnnnnnnnnnnnnnnnnnnnnnnnnnnnnnnnnnnnnnnnnnnnnnnnnnnnnnnnnnnnnnnnnnnnnnnnnnnnnnnnnnnnnnnnnnnnnnnnnnnnnnnnnnnnnnnnnnnnnnnnnnnnnnnnnnnnnnnnnnnnnnnnnnnnnnnnnnnnnnnnnnnnnnnnnnnnnnnnnnnnnnnnnnnnnnnnnnnnnnnnnnnnnnnnnnnnnnnnnnnnnnnnnnnnnnnnnnnnnnnnnnnnnnnnnnnnnnnnnnnnnnnnnnnnnnnnnnnnnnnnnnnnnnnnnnnnnnnnnnnnnnnnnnnnnnnnnnnnnnnnnnnnnnnnnnnnnnnnnnnnnnnnnnnnnnnnnnnnnnnnnnnnnnnnnnnnnnnnnnnnnnnnnnnnnnnnnnnnnnnnnnnnnnnnnnnnnnnnnnnnnnnnnnnnnnnnnnnnnnnnnnnnnnnnnnnnnnnnnnnnnnnnnnnnnnnnnnnnnnnnnnnnnnnnnnnnnnnnnnnnnnnnnnnnnnnnnnnnnnnnnnnnnnnnnnnnnnnnnnnnnnnnnnnnnnnnnnnnnnnnnnnnnnnnnnnnnnnnnnnnnnnnnnnnnnnnnnnnnnnnnnnnnnnnnnnnnnnnnnnnnnnnnnnnnnnnnnnnnnnnnnnnnnnnnnnnnnnnnnnnnnnnnnnnnnnnnnnnnnnnnnnnnnnnnnnnnnnnnnnnnnnnnnnnnnnnnnnnnnnnnnnnnnnnnnnnnnnnnnnnnnnnnnnnnnnnnnnnnnnnnnnnnnnnnnnnnnnnnnnnnnnnnnnnnnnnnnnnnnnnnnnnnnnnnnnnnnnnnnnnnnnnnnnnnnnnnnnnnnnnnnnnnnnnnnnnnnnnnnnnnnnnnnnnnnnnnnnnnnnnnnnnnnnnnnnnnnnnnnnnnnnnnnnnnnnnnnnnnnnnnnnnnnnnnnnnnnnnnnnnnnnnnnnnnnnnnnnnnnnnnnnnnnnnnnnnnnnnnnnnnnnnnnnnnnnnnnnnnnnnnnnnnnnnnnnnnnnnnnnnnnnnnnnnnnnnnnnnnnnnnnnnnnnnnnnnnnnnnnnnnnnnnnnnnnnnnnnnnnnnnnnnnnnnnnnnnnnnnnnnnnnnnnnnnnnnnnnnnnnnnnnnnnnnnnnnnnnnnnnnnnnnnnnnnnnnnnnnnnnnnnnnnnnnnnnnnnnnnnnnnnnnnnnnnnnnnnnnnnnnnnnnnnnnnnnnnnnnnnnnnnnnnnnnnnnnnnnnnnnnnnnnnnnnnnnnnnnnnnnnnnnnnnnnnnnnnnnnnnnnnnnnnnnnnnnnnnnnnnnnnnnnnnnnnnnnnnnnnnnnnnnnnnnnnnnnnnnnnnnnnnnnnnnnnnnnnnnnnnnnnnnnnnnnnnnnnnnnnnnnnnnnnnnnnnnnnnnnnnnnnnnnnnnnnnnnnnnnnnnnnnnnnnnnnnnnnnnnnnnnnnnnnnnnnnnnnnnnnnnnnnnnnnnnnnnnnnnnnnnnnnnnnnnnnnnnnnnnnnnnnnnnnnnnnnnnnnnnnnnnnnnnnnnnnnnnnnnnnnnnnnnnnnnnnnnnnnnnnnnnnnnnnnnnnnnnnnnnnnnnnnnnnnnnnnnnnnnnnnnnnnnnnnnnnnnnnnnnnnnnnnnnnnnnnnnnnnnnnnnnnnnnnnnnnnnnnnnnnnnnnnnnnnnnnnnnnnnnnnnnnnnnnnnnnnnnnnnnnnnnnnnnnnnnnnnnnnnnnnnnnnnnnnnnnnnnnnnnnnnnnnnnnnnnnnnnnnnnnnnnnnnnnnnnnnnnnnnnnnnnnnnnnnnnnnnnnnnnnnnnnnnnnnnnnnnnnnnnnnnnnnnnnnnnnnnnnnnnnnnnnnnnnnnnnnnnnnnnnnnnnnnnnnnnnnnnnnnnnnnnnnnnnnnnnnnnnnnnnnnnnnnnnnnnnnnnnnnnnnnnnnnnnnnnnnnnnnnnnnnnnnnnnnnnnnnnnnnnnnnnnnnnnnnnnnnnnnnnnnnnnnnnnnnnnnnnnnnnnnnnnnnnnnnnnnnnnnnnnnnnnnnnnnnnnnnnnnnnnnnnnnnnnnnnnnnnnnnnnnnnnnnnnnnnnnnnnnnnnnnnnnnnnnnnnnnnnnnnnnnnnnnnnnnnnnnnnnnnnnnnnnnnnnnnnnnnnnnnnnnnnnnnnnnnnnnnnnnnnnnnnnnnnnnnnnnnnnnnnnnnnnnnnnnnnnnnnnnnnnnnnnnnnnnnnnnnnnnnnnnnnnnnnnnnnnnnnnnnnnnnnnnnnnnnnnnnnnnnnnnnnnnnnnnnnnnnnnnnnnnnnnnnnnnnnnnnnnnnnnnnnnnnnnnnnnnnnnnnnnnnnnnnnnnnnnnnnnnnnnnnnnnnnnnnnnnnnnnnnnnnnnnnnnnnnnnnnnnnnnnnnnnnnnnnnnnnnnnnnnnnnnnnnnnnnnnnnnnnnnnnnnnnnnnnnnnnnnnnnnnnnnnnnnnnnnnnnnnnnnnnnnnnnnnnnnnnnnnnnnnnnnnnnnnnnnnnnnnnnnnnnnnnnnnnnnnnnnnnnnnnnnnnnnnnnnnnnnnnnnnnnnnnnnnnnnnnnnnnnnnnnnnnnnnnnnnnnnnnnnnnnnnnnnnnnnnnnnnnnnnnnnnnnnnnnnnnnnnnnnnnnnnnnnnnnnnnnnnnnnnnnnnnnnnnnnnnnnnnnnnnnnnnnnnnnnnnnnnnnnnnnnnnnnnnnnnnnnnnnnnnnnnnnnnnnnnnnnnnnnnnnnnnnnnnnnnnnnnnnnnnnnnnnnnnnnnnnnnnnnnnnnnnnnnnnnnnnnnnnnnnnnnnnnnnnnnnnnnnnnnnnnnnnnnnnnnnnnnnnnnnnnnnnnnnnnnnnnnnnnnnnnnnnnnnnnnnnnnnnnnnnnnnnnnnnnnnnnnnnnnnnnnnnnnnnnnnnnnnnnnnnnnnnnnnnnnnnnnnnnnnnnnnnnnnnnnnnnnnnnnnnnnnnnnnnnnnnnnnnnnnnnnnnnnnnnnnnnnnnnnnnnnnnnnnnnnnnnnnnnnnnnnnnnnnnnnnnnnnnnnnnnnnnnnnnnnnnnnnnnnnnnnnnnnnnnnnnnnnnnnnnnnnnnnnnnnnnnnnnnnnnnnnnnnnnnnnnnnnnnnnnnnnnnnnnnnnnnnnnnnnnnnnnnnnnnnnnnnnnnnnnnnnnnnnnnnnnnnnnnnnnnnnnnnnnnnnnnnnnnnnnnnnnnnnnnnnnnnnnnnnnnnnnnnnnnnnnnnnnnnnnnnnnnnnnnnnnnnnnnnnnnnnnnnnnnnnnnnnnnnnnnnnnnnnnnnnnnnnnnnnnnnnnnnnnnnnnnnnnnnnnnnnnnnnnnnnnnnnnnnnnnnnnnnnnnnnnnnnnnnnnnnnnnnnnnnnnnnnnnnnnnnnnnnnnnnnnnnnnnnnnnnnnnnnnnnnnnnnnnnnnnnnnnnnnnnnnnnnnnnnnnnnnnnnnnnnnnnnnnnnnnnnnnnnnnnnnnnnnnnnnnnnnnnnnnnnnnnnnnnnnnnnnnnnnnnnnnnnnnnnnnnnnnnnnnnnnnnnnnnnnnnnnnnnnnnnnnnnnnnnnnnnnnnnnnnnnnnnnnnnnnnnnnnnnnnnnnnnnnnnnnnnnnnnnnnnnnnnnnnnnnnnnnnnnnnnnnnnnnnnnnnnnnnnnnnnnnnnnnnnnnnnnnnnnnnnnnnnnnnnnnnnnnnnnnnnnnnnnnnnnnnnnnnnnnnnnnnnnnnnnnnnnnnnnnnnnnnnnnnnnnnnnnnnnnnnnnnnnnnnnnnnnnnnnnnnnnnnnnnnnnnnnnnnnnnnnnnnnnnnnnnnnnnnnnnnnnnnnnnnnnnnnnnnnnnnnnnnnnnnnnnnnnnnnnnnnnnnnnnnnnnnnnnnnnnnnnnnnnnnnnnnnnnnnnnnnnnnnnnnnnnnnnnnnnnnnnnnnnnnnnnnnnnnnnnnnnnnnnnnnnnnnnnnnnnnnnnnnnnnnnnnnnnnnnnnnnnnnnnnnnnnnnnnnnnnnnnnnnnnnnnnnnnnnnnnnnnnnnnnnnnnnnnnnnnnnnnnnnnnnnnnnnnnnnnnnnnnnnnnnnnnnnnnnnnnnnnnnnnnnnnnnnnnnnnnnnnnnnnnnnnnnnnnnnnnnnnnnnnnnnnnnnnnnnnnnnnnnnnnnnnnnnnnnnnnnnnnnnnnnnnnnnnnnnnnnnnnnnnnnnnnnnnnnnnnnnnnnnnnnnnnnnnnnnnnnnnnnnnnnnnnnnnnnnnnnnnnnnnnnnnnnnnnnnnnnnnnnnnnnnnnnnnnnnnnnnnnnnnnnnnnnnnnnnnnnnnnnnnnnnnnnnnnnnnnnnnnnnnnnnnnnnnnnnnnnnnnnnnnnnnnnnnnnnnnnnnnnnnnnnnnnnnnnnnnnnnnnnnnnnnnnnnnnnnnnnnnnnnnnnnnnnnnnnnnnnnnnnnnnnnnnnnnnnnnnnnnnnnnnnnnnnnnnnnnnnnnnnnnnnnnnnnnnnnnnnnnnnnnnnnnnnnnnnnnnnnnnnnnnnnnnnnnnnnnnnnnnnnnnnnnnnnnnnnnnnnnnnnnnnnnnnnnnnnnnnnnnnnnnnnnnnnnnnnnnnnnnnnnnnnnnnnnnnnnnnnnnnnnnnnnnnnnnnnnnnnnnnnnnnnnnnnnnnnnnnnnnnnnnnnnnnnnnnnnnnnnnnnnnnnnnnnnnnnnnnnnnnnnnnnnnnnnnnnnnnnnnnnnnnnnnnnnnnnnnnnnnnnnnnnnnnnnnnnnnnnnnnnnnnnnnnnnnnnnnnnnnnnnnnnnnnnnnnnnnnnnnnnnnnnnnnnnnnnnnnnnnnnnnnnnnnnnnnnnnnnnnnnnnnnnnnnnnnnnnnnnnnnnnnnnnnnnnnnnnnnnnnnnnnnnnnnnnnnnnnnnnnnnnnnnnnnnnnnnnnnnnnnnnnnnnnnnnnnnnnnnnnnnnnnnnnnnnnnnnnnnnnnnnnnnnnnnnnnnnnnnnnnnnnnnnnnnnnnnnnnnnnnnnnnnnnnnnnnnnnnnnnnnnnnnnnnnnnnnnnnnnnnnnnnnnnnnnnnnnnnnnnnnnnnnnnnnnnnnnnnnnnnnnnnnnnnnnnnnnnnnnnnnnnnnnnnnnnnnnnnnnnnnnnnnnnnnnnnnnnnnnnnnnnnnnnnnnnnnnnnnnnnnnnnnnnnnnnnnnnnnnnnnnnnnnnnnnnnnnnnnnnnnnnnnnnnnnnnnnnnnnnnnnnnnnnnnnnnnnnnnnnnnnnnnnnnnnnnnnnnnnnnnnnnnnnnnnnnnnnnnnnnnnnnnnnnnnnnnnnnnnnnnnnnnnnnnnnnnnnnnnnnnnnnnnnnnnnnnnnnnnnnnnnnnnnnnnnnnnnnnnnnnnnnnnnnnnnnnnnnnnnnnnnnnnnnnnnnnnnnnnnnnnnnnnnnnnnnnnnnnnnnnnnnnnnnnnnnnnnnnnnnnnnnnnnnnnnnnnnnnnnnnnnnnnnnnnnnnnnnnnnnnnnnnnnnnnnnnnnnnnnnnnnnnnnnnnnnnnnnnnnnnnnnnnnnnnnnnnnnnnnnnnnnnnnnnnnnnnnnnnnnnnnnnnnnnnnnnnnnnnnnnnnnnnnnnnnnnnnnnnnnnnnnnnnnnnnnnnnnnnnnnnnnnnnnnnnnnnnnnnnnnnnnnnnnnnnnnnnnnnnnnnnnnnnnnnnnnnnnnnnnnnnnnnnnnnnnnnnnnnnnnnnnnnnnnnnnnnnnnnnnnnnnnnnnnnnnnnnnnnnnnnnnnnnnnnnnnnnnnnnnnnnnnnnnnnnnnnnnnnnnnnnnnnnnnnnnnnnnnnnnnnnnnnnnnnnnnnnnnnnnnnnnnnnnnnnnnnnnnnnnnnnnnnnnnnnnnnnnnnnnnnnnnnnnnnnnnnnnnnnnnnnnnnnnnnnnnnnnnnnnnnnnnnnnnnnnnnnnnnnnnnnnnnnnnnnnnnnnnnnnnnnnnnnnnnnnnnnnnnnnnnnnnnnnnnnnnnnnnnnnnnnnnnnnnnnnnnnnnnnnnnnnnnnnnnnnnnnnnnnnnnnnnnnnnnnnnnnnnnnnnnnnnnnnnnnnnnnnnnnnnnnnnnnnnnnnnnnnnnnnnnnnnnnnnnnnnnnnnnnnnnnnnnnnnnnnnnnnnnnnnnnnnnnnnnnnnnnnnnnnnnnnnnnnnnnnnnnnnnnnnnnnnnnnnnnnnnnnnnnnnnnnnnnnnnnnnnnnnnnnnnnnnnnnnnnnnnnnnnnnnnnnnnnnnnnnnnnnnnnnnnnnnnnnnnnnnnnnnnnnnnnnnnnnnnnnnnnnnnnnnnnnnnnnnnnnnnnnnnnnnnnnnnnnnnnnnnnnnnnnnnnnnnnnnnnnnnnnnnnnnnnnnnnnnnnnnnnnnnnnnnnnnnnnnnnnnnnnnnnnnnnnnnnnnnnnnnnnnnnnnnnnnnnnnnnnnnnnnnnnnnnnnnnnnnnnnnnnnnnnnnnnnnnnnnnnnnnnnnnnnnnnnnnnnnnnnnnnnnnnnnnnnnnnnnnnnnnnnnnnnnnnnnnnnnnnnnnnnnnnnnnnnnnnnnnnnnnnnnnnnnnnnnnnnnnnnnnnnnnnnnnnnnnnnnnnnnnnnnnnnnnnnnnnnnnnnnnnnnnnnnnnnnnnnnnnnnnnnnnnnnnnnnnnnnnnnnnnnnnnnnnnnnnnnnnnnnnnnnnnnnnnnnnnnnnnnnnnnnnnnnnnnnnnnnnnnnnnnnnnnnnnnnnnnnnnnnnnnnnnnnnnnnnnnnnnnnnnnnnnnnnnnnnnnnnnnnnnnnnnnnnnnnnnnnnnnnnnnnnnnnnnnnnnnnnnnnnnnnnnnnnnnnnnnnnnnnnnnnnnnnnnnnnnnnnnnnnnnnnnnnnnnnnnnnnnnnnnnnnnnnnnnnnnnnnnnnnnnnnnnnnnnnnnnnnnnnnnnnnnnnnnnnnnnnnnnnnnnnnnnnnnnnnnnnnnnnnnnnnnnnnnnnnnnnnnnnnnnnnnnnnnnnnnnnnnnnnnnnnnnnnnnnnnnnnnnnnnnnnnnnnnnnnnnnnnnnnnnnnnnnnnnnnnnnnnnnnnnnnnnnnnnnnnnnnnnnnnnnnnnnnnnnnnnnnnnnnnnnnnnnnnnnnnnnnnnnnnnnnnnnnnnnnnnnnnnnnnnnnnnnnnnnnnnnnnnnnnnnnnnnnnnnnnnnnnnnnnnnnnnnnnnnnnnnnnnnnnnnnnnnnnnnnnnnnnnnnnnnnnnnnnnnnnnnnnnnnnnnnnnnnnnnnnnnnnnnnnnnnnnnnnnnnnnnnnnnnnnnnnnnnnnnnnnnnnnnnnnnnnnnnnnnnnnnnnnnnnnnnnnnnnnnnnnnnnnnnnnnnnnnnnnnnnnnnnnnnnnnnnnnnnnnnnnnnnnnnnnnnnnnnnnnnnnnnnnnnnnnnnnnnnnnnnnnnnnnnnnnnnnnnnnnnnnnnnnnnnnnnnnnnnnnnnnnnnnnnnnnnnnnnnnnnnnnnnnnnnnnnnnnnnnnnnnnnnnnnnnnnnnnnnnnnnnnnnnnnnnnnnnnnnnnnnnnnnnnnnnnnnnnnnnnnnnnnnnnnnnnnnnnnnnnnnnnnnnnnnnnnnnnnnnnnnnnnnnnnnnnnnnnnnnnnnnnnnnnnnnnnnnnnnnnnnnnnnnnnnnnnnnnnnnnnnnnnnnnnnnnnnnnnnnnnnnnnnnnnnnnnnnnnnnnnnnnnnnnnnnnnnnnnnnnnnnnnnnnnnnnnnnnnnnnnnnnnnnnnnnnnnnnnnnnnnnnnnnnnnnnnnnnnnnnnnnnnnnnnnnnnnnnnnnnnnnnnnnnnnnnnnnnnnnnnnnnnnnnnnnnnnnnnnnnnnnnnnnnnnnnnnnnnnnnnnnnnnnnnnnnnnnnnnnnnnnnnnnnnnnnnnnnnnnnnnnnnnnnnnnnnnnnnnnnnnnnnnnnnnnnnnnnnnnnnnnnnnnnnnnnnnnnnnnnnnnnnnnnnnnnnnnnnnnnnnnnnnnnnnnnnnnnnnnnnnnnnnnnnnnnnnnnnnnnnnnnnnnnnnnnnnnnnnnnnnnnnnnnnnnnnnnnnnnnnnnnnnnnnnnnnnnnnnnnnnnnnnnnnnnnnnnnnnnnnnnnnnnnnnnnnnnnnnnnnnnnnnnnnnnnnnnnnnnnnnnnnnnnnnnnnnnnnnnnnnnnnnnnnnnnnnnnnnnnnnnnnnnnnnnnnnnnnnnnnnnnnnnnnnnnnnnnnnnnnnnnnnnnnnnnnnnnnnnnnnnnnnnnnnnnnnnnnnnnnnnnnnnnnnnnnnnnnnnnnnnnnnnnnnnnnnnnnnnnnnnnnnnnnnnnnnnnnnnnnnnnnnnnnnnnnnnnnnnnnnnnnnnnnnnnnnnnnnnnnnnnnnnnnnnnnnnnnnnnnnnnnnnnnnnnnnnnnnnnnnnnnnnnnnnnnnnnnnnnnnnnnnnnnnnnnnnnnnnnnnnnnnnnnnnnnnnnnnnnnnnnnnnnnnnnnnnnnnnnnnnnnnnnnnnnnnnnnnnnnnnnnnnnnnnnnnnnnnnnnnnnnnnnnnnnnnnnnnnnnnnnnnnnnnnnnnnnnnnnnnnnnnnnnnnnnnnnnnnnnnnnnnnnnnnnnnnnnnnnnnnnnnnnnnnnnnnnnnnnnnnnnnnnnnnnnnnnnnnnnnnnnnnnnnnnnnnnnnnnnnnnnnnnnnnnnnnnnnnnnnnnnnnnnnnnnnnnnnnnnnnnnnnnnnnnnnnnnnnnnnnnnnnnnnnnnnnnnnnnnnnnnnnnnnnnnnnnnnnnnnnnnnnnnnnnnnnnnnnnnnnnnnnnnnnnnnnnnnnnnnnnnnnnnnnnnnnnnnnnnnnnnnnnnnnnnnnnnnnnnnnnnnnnnnnnnnnnnnnnnnnnnnnnnnnnnnnnnnnnnnnnnnnnnnnnnnnnnnnnnnnnnnnnnnnnnnnnnnnnnnnnnnnnnnnnnnnnnnnnnnnnnnnnnnnnnnnnnnnnnnnnnnnnnnnnnnnnnnnnnnnnnnnnnnnnnnnnnnnnnnnnnnnnnnnnnnnnnnnnnnnnnnnnnnnnnnnnnnnnnnnnnnnnnnnnnnnnnnnnnnnnnnnnnnnnnnnnnnnnnnnnnnnnnnnnnnnnnnnnnnnnnnnnnnnnnnnnnnnnnnnnnnnnnnnnnnnnnnnnnnnnnnnnnnnnnnnnnnnnnnnnnnnnnnnnnnnnnnnnnnnnnnnnnnnnnnnnnnnnnnnnnnnnnnnnnnnnnnnnnnnnnnnnnnnnnnnnnnnnnnnnnnnnnnnnnnnnnnnnnnnnnnnnnnnnnnnnnnnnnnnnnnnnnnnnnnnnnnnnnnnnnnnnnnnnnnnnnnnnnnnnnnnnnnnnnnnnnnnnnnnnnnnnnnnnnnnnnnnnnnnnnnnnnnnnnnnnnnnnnnnnnnnnnnnnnnnnnnnnnnnnnnnnnnnnnnnnnnnnnnnnnnnnnnnnnnnnnnnnnnnnnnnnnnnnnnnnnnnnnnnnnnnnnnnnnnnnnnnnnnnnnnnnnnnnnnnnnnnnnnnnnnnnnnnnnnnnnnnnnnnnnnnnnnnnnnnnnnnnnnnnnnnnnnnnnnnnnnnnnnnnnnnnnnnnnnnnnnnnnnnnnnnnnnnnnnnnnnnnnnnnnnnnnnnnnnnnnnnnnnnnnnnnnnnnnnnnnnnnnnnnnnnnnnnnnnnnnnnnnnnnnnnnnnnnnnnnnnnnnnnnnnnnnnnnnnnnnnnnnnnnnnnnnnnnnnnnnnnnnnnnnnnnnnnnnnnnnnnnnnnnnnnnnnnnnnnnnnnnnnnnnnnnnnnnnnnnnnnnnnnnnnnnnnnnnnnnnnnnnnnnnnnnnnnnnnnnnnnnnnnnnnnnnnnnnnnnnnnnnnnnnnnnnnnnnnnnnnnnnnnnnnnnnnnnnnnnnnnnnnnnnnnnnnnnnnnnnnnnnnnnnnnnnnnnnnnnnnnnnnnnnnnnnnnnnnnnnnnnnnnnnnnnnnnnnnnnnnnnnnnnnnnnnnnnnnnnnnnnnnnnnnnnnnnnnnnnnnnnnnnnnnnnnnnnnnnnnnnnnnnnnnnnnnnnnnnnnnnnnnnnnnnnnnnnnnnnnnnnnnnnnnnnnnnnnnnnnnnnnnnnnnnnnnnnnnnnnnnnnnnnnnnnnnnnnnnnnnnnnnnnnnnnnnnnnnnnnnnnnnnnnnnnnnnnnnnnnnnnnnnnnnnnnnnnnnnnnnnnnnnnnnnnnnnnnnnnnnnnnnnnnnnnnnnnnnnnnnnnnnnnnnnnnnnnnnnnnnnnnnnnnnnnnnnnnnnnnnnnnnnnnnnnnnnnnnnnnnnnnnnnnnnnnnnnnnnnnnnnnnnnnnnnnnnnnnnnnnnnnnnnnnnnnnnnnnnnnnnnnnnnnnnnnnnnnnnnnnnnnnnnnnnnnnnnnnnnnnnnnnnnnnnnnnnnnnnnnnnnnnnnnnnnnnnnnnnnnnnnnnnnnnnnnnnnnnnnnnnnnnnnnnnnnnnnnnnnnnnnnnnnnnnnnnnnnnnnnnnnnnnnnnnnnnnnnnnnnnnnnnnnnnnnnnnnnnnnnnnnnnnnnnnnnnnnnnnnnnnnnnnnnnnnnnnnnnnnnnnnnnnnnnnnnnnnnnnnnnnnnnnnnnnnnnnnnnnnnnnnnnnnnnnnnnnnnnnnnnnnnnnnnnnnnnnnnnnnnnnnnnnnnnnnnnnnnnnnnnnnnnnnnnnnnnnnnnnnnnnnnnnnnnnnnnnnnnnnnnnnnnnnnnnnnnnnnnnnnnnnnnnnnnnnnnnnnnnnnnnnnnnnnnnnnnnnnnnnnnnnnnnnnnnnnnnnnnnnnnnnnnnnnnnnnnnnnnnnnnnnnnnnnnnnnnnnnnnnnnnnnnnnnnnnnnnnnnnnnnnnnnnnnnnnnnnnnnnnnnnnnnnnnnnnnnnnnnnnnnnnnnnnnnnnnnnnnnnnnnnnnnnnnnnnnnnnnnnnnnnnnnnnnnnnnnnnnnnnnnnnnnnnnnnnnnnnnnnnnnnnnnnnnnnnnnnnnnnnnnnnnnnnnnnnnnnnnnnnnnnnnnnnnnnnnnnnnnnnnnnnnnnnnnnnnnnnnnnnnnnnnnnnnnnnnnnnnnnnnnnnnnnnnnnnnnnnnnnnnnnnnnnnnnnnnnnnnnnnnnnnnnnnnnnnnnnnnnnnnnnnnnnnnnnnnnnnnnnnnnnnnnnnnnnnnnnnnnnnnnnnnnnnnnnnnnnnnnnnnnnnnnnnnnnnnnnnnnnnnnnnnnnnnnnnnnnnnnnnnnnnnnnnnnnnnnnnnnnnnnnnnnnnnnnnnnnnnnnnnnnnnnnnnnnnnnnnnnnnnnnnnnnnnnnnnnnnnnnnnnnnnnnnnnnnnnnnnnnnnnnnnnnnnnnnnnnnnnnnnnnnnnnnnnnnnnnnnnnnnnnnnnnnnnnnnnnnnnnnnnnnnnnnnnnnnnnnnnnnnnnnnnnnnnnnnnnnnnnnnnnnnnnnnnnnnnnnnnnnnnnnnnnnnnnnnnnnnnnnnnnnnnnnnnnnnnnnnnnnnnnnnnnnnnnnnnnnnnnnnnnnnnnnnnnnnnnnnnnnnnnnnnnnnnnnnnnnnnnnnnnnnnnnnnnnnnnnnnnnnnnnnnnnnnnnnnnnnnnnnnnnnnnnnnnnnnnnnnnnnnnnnnnnnnnnnnnnnnnnnnnnnnnnnnnnnnnnnnnnnnnnnnnnnnnnnnnnnnnnnnnnnnnnnnnnnnnnnnnnnnnnnnnnnnnnnnnnnnnnnnnnnnnnnnnnnnnnnnnnnnnnnnnnnnnnnnnnnnnnnnnnnnnnnnnnnnnnnnnnnnnnnnnnnnnnnnnnnnnnnnnnnnnnnnnnnnnnnnnnnnnnnnnnnnnnnnnnnnnnnnnnnnnnnnnnnnnnnnnnnnnnnnnnnnnnnnnnnnnnnnnnnnnnnnnnnnnnnnnnnnnnnnnnnnnnnnnnnnnnnnnnnnnnnnnnnnnnnnnnnnnnnnnnnnnnnnnnnnnnnnnnnnnnnnnnnnnnnnnnnnnnnnnnnnnnnnnnnnnnnnnnnnnnnnnnnnnnnnnnnnnnnnnnnnnnnnnnnnnnnnnnnnnnnnnnnnnnnnnnnnnnnnnnnnnnnnnnnnnnnnnnnnnnnnnnnnnnnnnnnnnnnnnnnnnnnnnnnnnnnnnnnnnnnnnnnnnnnnnnnnnnnnnnnnnnnnnnnnnnnnnnnnnnnnnnnnnnnnnnnnnnnnnnnnnnnnnnnnnnnnnnnnnnnnnnnnnnnnnnnnnnnnnnnnnnnnnnnnnnnnnnnnnnnnnnnnnnnnnnnnnnnnnnnnnnnnnnnnnnnnnnnnnnnnnnnnnnnnnnnnnnnnnnnnnnnnnnnnnnnnnnnnnnnnnnnnnnnnnnnnnnnnnnnnnnnnnnnnnnnnnnnnnnnnnnnnnnnnnnnnnnnnnnnnnnnnnnnnnnnnnnnnnnnnnnnnnnnnnnnnnnnnnnnnnnnnnnnnnnnnnnnnnnnnnnnnnnnnnnnnnnnnnnnnnnnnnnnnnnnnnnnnnnnnnnnnnnnnnnnnnnnnnnnnnnnnnnnnnnnnnnnnnnnnnnnnnnnnnnnnnnnnnnnnnnnnnnnnnnnnnnnnnnnnnnnnnnnnnnnnnnnnnnnnnnnnnnnnnnnnnnnnnnnnnnnnnnnnnnnnnnnnnnnnnnnnnnnnnnnnnnnnnnnnnnnnnnnnnnnnnnnnnnnnnnnnnnnnnnnnnnnnnnnnnnnnnnnnnnnnnnnnnnnnnnnnnnnnnnnnnnnnnnnnnnnnnnnnnnnnnnnnnnnnnnnnnnnnnnnnnnnnnnnnnnnnnnnnnnnnnnnnnnnnnnnnnnnnnnnnnnnnnnnnnnnnnnnnnnnnnnnnnnnnnnnnnnnnnnnnnnnnnnnnnnnnnnnnnnnnnnnnnnnnnnnnnnnnnnnnnnnnnnnnnnnnnnnnnnnnnnnnnnnnnnnnnnnnnnnnnnnnnnnnnnnnnnnnnnnnnnnnnnnnnnnnnnnnnnnnnnnnnnnnnnnnnnnnnnnnnnnnnnnnnnnnnnnnnnnnnnnnnnnnnnnnnnnnnnnnnnnnnnnnnnnnnnnnnnnnnnnnnnnnnnnnnnnnnnnnnnnnnnnnnnnnnnnnnnnnnnnnnnnnnnnnnnnnnnnnnnnnnnnnnnnnnnnnnnnnnnnnnnnnnnnnnnnnnnnnnnnnnnnnnnnnnnnnnnnnnnnnnnnnnnnnnnnnnnnnnnnnnnnnnnnnnnnnnnnnnnnnnnnnnnnnnnnnnnnnnnnnnnnnnnnnnnnnnnnnnnnnnnnnnnnnnnnnnnnnnnnnnnnnnnnnnnnnnnnnnnnnnnnnnnnnnnnnnnnnnnnnnnnnnnnnnnnnnnnnnnnnnnnnnnnnnnnnnnnnnnnnnnnnnnnnnnnnnnnnnnnnnnnnnnnnnnnnnnnnnnnnnnnnnnnnnnnnnnnnnnnnnnnnnnnnnnnnnnnnnnnnnnnnnnnnnnnnnnnnnnnnnnnnnnnnnnnnnnnnnnnnnnnnnnnnnnnnnnnnnnnnnnnnnnnnnnnnnnnnnnnnnnnnnnnnnnnnnnnnnnnnnnnnnnnnnnnnnnnnnnnnnnnnnnnnnnnnnnnnnnnnnnnnnnnnnnnnnnnnnnnnnnnnnnnnnnnnnnnnnnnnnnnnnnnnnnnnnnnnnnnnnnnnnnnnnnnnnnnnnnnnnnnnnnnnnnnnnnnnnnnnnnnnnnnnnnnnnnnnnnnnnnnnnnnnnnnnnnnnnnnnnnnnnnnnnnnnnnnnnnnnnnnnnnnnnnnnnnnnnnnnnnnnnnnnnnnnnnnnnnnnnnnnnnnnnnnnnnnnnnnnnnnnnnnnnnnnnnnnnnnnnnnnnnnnnnnnnnnnnnnnnnnnnnnnnnnnnnnnnnnnnnnnnnnnnnnnnnnnnnnnnnnnnnnnnnnnnnnnnnnnnnnnnnnnnnnnnnnnnnnnnnnnnnnnnnnnnnnnnnnnnnnnnnnnnnnnnnnnnnnnnnnnnnnnnnnnnnnnnnnnnnnnnnnnnnnnnnnnnnnnnnnnnnnnnnnnnnnnnnnnnnnnnnnnnnnnnnnnnnnnnnnnnnnnnnnnnnnnnnnnnnnnnnnnnnnnnnnnnnnnnnnnnnnnnnnnnnnnnnnnnnnnnnnnnnnnnnnnnnnnnnnnnnnnnnnnnnnnnnnnnnnnnnnnnnnnnnnnnnnnnnnnnnnnnnnnnnnnnnnnnnnnnnnnnnnnnnnnnnnnnnnnnnnnnnnnnnnnnnnnnnnnnnnnnnnnnnnnnnnnnnnnnnnnnnnnnnnnnnnnnnnnnnnnnnnnnnnnnnnnnnnnnnnnnnnnnnnnnnnnnnnnnnnnnnnnnnnnnnnnnnnnnnnnnnnnnnnnnnnnnnnnnnnnnnnnnnnnnnnnnnnnnnnnnnnnnnnnnnnnnnnnnnnnnnnnnnnnnnnnnnnnnnnnnnnnnnnnnnnnnnnnnnnnnnnnnnnnnnnnnnnnnnnnnnnnnnnnnnnnnnnnnnnnnnnnnnnnnnnnnnnnnnnnnnnnnnnnnnnnnnnnnnnnnnnnnnnnnnnnnnnnnnnnnnnnnnnnnnnnnnnnnnnnnnnnnnnnnnnnnnnnnnnnnnnnnnnnnnnnnnnnnnnnnnnnnnnnnnnnnnnnnnnnnnnnnnnnnnnnnnnnnnnnnnnnnnnnnnnnnnnnnnnnnnnnnnnnnnnnnnnnnnnnnnnnnnnnnnnnnnnnnnnnnnnnnnnnnnnnnnnnnnnnnnnnnnnnnnnnnnnnnnnnnnnnnnnnnnnnnnnnnnnnnnnnnnnnnnnnnnnnnnnnnnnnnnnnnnnnnnnnnnnnnnnnnnnnnnnnnnnnnnnnnnnnnnnnnnnnnnnnnnnnnnnnnnnnnnnnnnnnnnnnnnnnnnnnnnnnnnnnnnnnnnnnnnnnnnnnnnnnnnnnnnnnnnnnnnnnnnnnnnnnnnnnnnnnnnnnnnnnnnnnnnnnnnnnnnnnnnnnnnnnnnnnnnnnnnnnnnnnnnnnnnnnnnnnnnnnnnnnnnnnnnnnnnnnnnnnnnnnnnnnnnnnnnnnnnnnnnnnnnnnnnnnnnnnnnnnnnnnnnnnnnnnnnnnnnnnnnnnnnnnnnnnnnnnnnnnnnnnnnnnnnnnnnnnnnnnnnnnnnnnnnnnnnnnnnnnnnnnnnnnnnnnnnnnnnnnnnnnnnnnnnnnnnnnnnnnnnnnnnnnnnnnnnnnnnnnnnnnnnnnnnnnnnnnnnnnnnnnnnnnnnnnnnnnnnnnnnnnnnnnnnnnnnnnnnnnnnnnnnnnnnnnnnnnnnnnnnnnnnnnnnnnnnnnnnnnnnnnnnnnnnnnnnnnnnnnnnnnnnnnnnnnnnnnnnnnnnnnnnnnnnnnnnnnnnnnnnnnnnnnnnnnnnnnnnnnnnnnnnnnnnnnnnnnnnnnnnnnnnnnnnnnnnnnnnnnnnnnnnnnnnnnnnnnnnnnnnnnnnnnnnnnnnnnnnnnnnnnnnnnnnnnnnnnnnnnnnnnnnnnnnnnnnnnnnnnnnnnnnnnnnnnnnnnnnnnnnnnnnnnnnnnnnnnnnnnnnnnnnnnnnnnnnnnnnnnnnnnnnnnnnnnnnnnnnnnnnnnnnnnnnnnnnnnnnnnnnnnnnnnnnnnnnnnnnnnnnnnnnnnnnnnnnnnnnnnnnnnnnnnnnnnnnnnnnnnnnnnnnnnnnnnnnnnnnnnnnnnnnnnnnnnnnnnnnnnnnnnnnnnnnnnnnnnnnnnnnnnnnnnnnnnnnnnnnnnnnnnnnnnnnnnnnnnnnnnnnnnnnnnnnnnnnnnnnnnnnnnnnnnnnnnnnnnnnnnnnnnnnnnnnnnnnnnnnnnnnnnnnnnnnnnnnnnnnnnnnnnnnnnnnnnnnnnnnnnnnnnnnnnnnnnnnnnnnnnnnnnnnnnnnnnnnnnnnnnnnnnnnnnnnnnnnnnnnnnnnnnnnnnnnnnnnnnnnnnnnnnnnnnnnnnnnnnnnnnnnnnnnnnnnnnnnnnnnnnnnnnnnnnnnnnnnnnnnnnnnnnnnnnnnnnnnnnnnnnnnnnnnnnnnnnnnnnnnnnnnnnnnnnnnnnnnnnnnnnnnnnnnnnnnnnnnnnnnnnnnnnnnnnnnnnnnnnnnnnnnnnnnnnnnnnnnnnnnnnnnnnnnnnnnnnnnnnnnnnnnnnnnnnnnnnnnnnnnnnnnnnnnnnnnnnnnnnnnnnnnnnnnnnnnnnnnnnnnnnnnnnnnnnnnnnnnnnnnnnnnnnnnnnnnnnnnnnnnnnnnnnnnnnnnnnnnnnnnnnnnnnnnnnnnnnnnnnnnnnnnnnnnnnnnnnnnnnnnnnnnnnnnnnnnnnnnnnnnnnnnnnnnnnnnnnnnnnnnnnnnnnnnnnnnnnnnnnnnnnnnnnnnnnnnnnnnnnnnnnnnnnnnnnnnnnnnnnnnnnnnnnnnnnnnnnnnnnnnnnnnnnnnnnnnnnnnnnnnnnnnnnnnnnnnnnnnnnnnnnnnnnnnnnnnnnnnnnnnnnnnnnnnnnnnnnnnnnnnnnnnnnnnnnnnnnnnnnnnnnnnnnnnnnnnnnnnnnnnnnnnnnnnnnnnnnnnnnnnnnnnnnnnnnnnnnnnnnnnnnnnnnnnnnnnnnnnnnnnnnnnnnnnnnnnnnnnnnnnnnnnnnnnnnnnnnnnnnnnnnnnnnnnnnnnnnnnnnnnnnnnnnnnnnnnnnnnnnnnnnnnnnnnnnnnnnnnnnnnnnnnnnnnnnnnnnnnnnnnnnnnnnnnnnnnnnnnnnnnnnnnnnnnnnnnnnnnnnnnnnnnnnnnnnnnnnnnnnnnnnnnnnnnnnnnnnnnnnnnnnnnnnnnnnnnnnnnnnnnnnnnnnnnnnnnnnnnnnnnnnnnnnnnnnnnnnnnnnnnnnnnnnnnnnnnnnnnnnnnnnnnnnnnnnnnnnnnnnnnnnnnnnnnnnnnnnnnnnnnnnnnnnnnnnnnnnnnnnnnnnnnnnnnnnnnnnnnnnnnnnnnnnnnnnnnnnnnnnnnnnnnnnnnnnnnnnnnnnnnnnnnnnnnnnnnnnnnnnnnnnnnnnnnnnnnnnnnnnnnnnnnnnnnnnnnnnnnnnnnnnnnnnnnnnnnnnnnnnnnnnnnnnnnnnnnnnnnnnnnnnnnnnnnnnnnnnnnnnnnnnnnnnnnnnnnnnnnnnnnnnnnnnnnnnnnnnnnnnnnnnnnnnnnnnnnnnnnnnnnnnnnnnnnnnnnnnnnnnnnnnnnnnnnnnnnnnnnnnnnnnnnnnnnnnnnnnnnnnnnnnnnnnnnnnnnnnnnnnnnnnnnnnnnnnnnnnnnnnnnnnnnnnnnnnnnnnnnnnnnnnnnnnnnnnnnnnnnnnnnnnnnnnnnnnnnnnnnnnnnnnnnnnnnnnnnnnnnnnnnnnnnnnnnnnnnnnnnnnnnnnnnnnnnnnnnnnnnnnnnnnnnnnnnnnnnnnnnnnnnnnnnnnnnnnnnnnnnnnnnnnnnnnnnnnnnnnnnnnnnnnnnnnnnnnnnnnnnnnnnnnnnnnnnnnnnnnnnnnnnnnnnnnnnnnnnnnnnnnnnnnnnnnnnnnnnnnnnnnnnnnnnnnnnnnnnnnnnnnnnnnnnnnnnnnnnnnnnnnnnnnnnnnnnnnnnnnnnnnnnnnnnnnnnnnnnnnnnnnnnnnnnnnnnnnnnnnnnnnnnnnnnnnnnnnnnnnnnnnnnnnnnnnnnnnnnnnnnnnnnnnnnnnnnnnnnnnnnnnnnnnnnnnnnnnnnnnnnnnnnnnnnnnnnnnnnnnnnnnnnnnnnnnnnnnnnnnnnnnnnnnnnnnnnnnnnnnnnnnnnnnnnnnnnnnnnnnnnnnnnnnnnnnnnnnnnnnnnnnnnnnnnnnnnnnnnnnnnnnnnnnnnnnnnnnnnnnnnnnnnnnnnnnnnnnnnnnnnnnnnnnnnnnnnnnnnnnnnnnnnnnnnnnnnnnnnnnnnnnnnnnnnnnnnnnnnnnnnnnnnnnnnnnnnnnnnnnnnnnnnnnnnnnnnnnnnnnnnnnnnnnnnnnnnnnnnnnnnnnnnnnnnnnnnnnnnnnnnnnnnnnnnnnnnnnnnnnnnnnnnnnnnnnnnnnnnnnnnnnnnnnnnnnnnnnnnnnnnnnnnnnnnnnnnnnnnnnnnnnnnnnnnnnnnnnnnnnnnnnnnnnnnnnnnnnnnnnnnnnnnnnnnnnnnnnnnnnnnnnnnnnnnnnnnnnnnnnnnnnnnnnnnnnnnnnnnnnnnnnnnnnnnnnnnnnnnnnnnnnnnnnnnnnnnnnnnnnnnnnnnnnnnnnnnnnnnnnnnnnnnnnnnnnnnnnnnnnnnnnnnnnnnnnnnnnnnnnnnnnnnnnnnnnnnnnnnnnnnnnnnnnnnnnnnnnnnnnnnnnnnnnnnnnnnnnnnnnnnnnnnnnnnnnnnnnnnnnnnnnnnnnnnnnnnnnnnnnnnnnnnnnnnnnnnnnnnnnnnnnnnnnnnnnnnnnnnnnnnnnnnnnnnnnnnnnnnnnnnnnnnnnnnnnnnnnnnnnnnnnnnnnnnnnnnnnnnnnnnnnnnnnnnnnnnnnnnnnnnnnnnnnnnnnnnnnnnnnnnnnnnnnnnnnnnnnnnnnnnnnnnnnnnnnnnnnnnnnnnnnnnnnnnnnnnnnnnnnnnnnnnnnnnnnnnnnnnnnnnnnnnnnnnnnnnnnnnnnnnnnnnnnnnnnnnnnnnnnnnnnnnnnnnnnnnnnnnnnnnnnnnnnnnnnnnnnnnnnnnnnnnnnnnnnnnnnnnnnnnnnnnnnnnnnnnnnnnnnnnnnnnnnnnnnnnnnnnnnnnnnnnnnnnnnnnnnnnnnnnnnnnnnnnnnnnnnnnnnnnnnnnnnnnnnnnnnnnnnnnnnnnnnnnnnnnnnnnnnnnnnnnnnnnnnnnnnnnnnnnnnnnnnnnnnnnnnnnnnnnnnnnnnnnnnnnnnnnnnnnnnnnnnnnnnnnnnnnnnnnnnnnnnnnnnnnnnnnnnnnnnnnnnnnnnnnnnnnnnnnnnnnnnnnnnnnnnnnnnnnnnnnnnnnnnnnnnnnnnnnnnnnnnnnnnnnnnnnnnnnnnnnnnnnnnnnnnnnnnnnnnnnnnnnnnnnnnnnnnnnnnnnnnnnnnnnnnnnnnnnnnnnnnnnnnnnnnnnnnnnnnnnnnnnnnnnnnnnnnnnnnnnnnnnnnnnnnnnnnnnnnnnnnnnnnnnnnnnnnnnnnnnnnnnnnnnnnnnnnnnnnnnnnnnnnnnnnnnnnnnnnnnnnnnnnnnnnnnnnnnnnnnnnnnnnnnnnnnnnnnnnnnnnnnnnnnnnnnnnnnnnnnnnnnnnnnnnnnnnnnnnnnnnnnnnnnnnnnnnnnnnnnnnnnnnnnnnnnnnnnnnnnnnnnnnnnnnnnnnnnnnnnnnnnnnnnnnnnnnnnnnnnnnnnnnnnnnnnnnnnnnnnnnnnnnnnnnnnnnnnnnnnnnnnnnnnnnnnnnnnnnnnnnnnnnnnnnnnnnnnnnnnnnnnnnnnnnnnnnnnnnnnnnnnnnnnnnnnnnnnnnnnnnnnnnnnnnnnnnnnnnnnnnnnnnnnnnnnnnnnnnnnnnnnnnnnnnnnnnnnnnnnnnnnnnnnnnnnnnnnnnnnnnnnnnnnnnnnnnnnnnnnnnnnnnnnnnnnnnnnnnnnnnnnnnnnnnnnnnnnnnnnnnnnnnnnnnnnnnnnnnnnnnnnnnnnnnnnnnnnnnnnnnnnnnnnnnnnnnnnnnnnnnnnnnnnnnnnnnnnnnnnnnnnnnnnnnnnnnnnnnnnnnnnnnnnnnnnnnnnnnnnnnnnnnnnnnnnnnnnnnnnnnnnnnnnnnnnnnnnnnnnnnnnnnnnnnnnnnnnnnnnnnnnnnnnnnnnnnnnnnnnnnnnnnnnnnnnnnnnnnnnnnnnnnnnnnnnnnnnnnnnnnnnnnnnnnnnnnnnnnnnnnnnnnnnnnnnnnnnnnnnnnnnnnnnnnnnnnnnnnnnnnnnnnnnnnnnnnnnnnnnnnnnnnnnnnnnnnnnnnnnnnnnnnnnnnnnnnnnnnnnnnnnnnnnnnnnnnnnnnnnnnnnnnnnnnnnnnnnnnnnnnnnnnnnnnnnnnnnnnnnnnnnnnnnnnnnnnnnnnnnnnnnnnnnnnnnnnnnnnnnnnnnnnnnnnnnnnnnnnnnnnnnnnnnnnnnnnnnnnnnnnnnnnnnnnnnnnnnnnnnnnnnnnnnnnnnnnnnnnnnnnnnnnnnnnnnnnnnnnnnnnnnnnnnnnnnnnnnnnnnnnnnnnnnnnnnnnnnnnnnnnnnnnnnnnnnnnnnnnnnnnnnnnnnnnnnnnnnnnnnnnnnnnnnnnnnnnnnnnnnnnnnnnnnnnnnnnnnnnnnnnnnnnnnnnnnnnnnnnnnnnnnnnnnnnnnnnnnnnnnnnnnnnnnnnnnnnnnnnnnnnnnnnnnnnnnnnnnnnnnnnnnnnnnnnnnnnnnnnnnnnnnnnnnnnnnnnnnnnnnnnnnnnnnnnnnnnnnnnnnnnnnnnnnnnnnnnnnnnnnnnnnnnnnnnnnnnnnnnnnnnnnnnnnnnnnnnnnnnnnnnnnnnnnnnnnnnnnnnnnnnnnnnnnnnnnnnnnnnnnnnnnnnnnnnnnnnnnnnnnnnnnnnnnnnnnnnnnnnnnnnnnnnnnnnnnnnnnnnnnnnnnnnnnnnnnnnnnnnnnnnnnnnnnnnnnnnnnnnnnnnnnnnnnnnnnnnnnnnnnnnnnnnnnnnnnnnnnnnnnnnnnnnnnnnnnnnnnnnnnnnnnnnnnnnnnnnnnnnnnnnnnnnnnnnnnnnnnnnnnnnnnnnnnnnnnnnnnnnnnnnnnnnnnnnnnnnnnnnnnnnnnnnnnnnnnnnnnnnnnnnnnnnnnnnnnnnnnnnnnnnnnnnnnnnnnnnnnnnnnnnnnnnnnnnnnnnnnnnnnnnnnnnnnnnnnnnnnnnnnnnnnnnnnnnnnnnnnnnnnnnnnnnnnnnnnnnnnnnnnnnnnnnnnnnnnnnnnnnnnnnnnnnnnnnnnnnnnnnnnnnnnnnnnnnnnnnnnnnnnnnnnnnnnnnnnnnnnnnnnnnnnnnnnnnnnnnnnnnnnnnnnnnnnnnnnnnnnnnnnnnnnnnnnnnnnnnnnnnnnnnnnnnnnnnnnnnnnnnnnnnnnnnnnnnnnnnnnnnnnnnnnnnnnnnnnnnnnnnnnnnnnnnnnnnnnnnnnnnnnnnnnnnnnnnnnnnnnnnnnnnnnnnnnnnnnnnnnnnnnnnnnnnnnnnnnnnnnnnnnnnnnnnnnnnnnnnnnnnnnnnnnnnnnnnnnnnnnnnnnnnnnnnnnnnnnnnnnnnnnnnnnnnnnnnnnnnnnnnnnnnnnnnnnnnnnnnnnnnnnnnnnnnnnnnnnnnnnnnnnnnnnnnnnnnnnnnnnnnnnnnnnnnnnnnnnnnnnnnnnnnnnnnnnnnnnnnnnnnnnnnnnnnnnnnnnnnnnnnnnnnnnnnnnnnnnnnnnnnnnnnnnnnnnnnnnnnnnnnnnnnnnnnnnnnnnnnnnnnnnnnnnnnnnnnnnnnnnnnnnnnnnnnnnnnnnnnnnnnnnnnnnnnnnnnnnnnnnnnnnnnnnnnnnnnnnnnnnnnnnnnnnnnnnnnnnnnnnnnnnnnnnnnnnnnnnnnnnnnnnnnnnnnnnnnnnnnnnnnnnnnnnnnnnnnnnnnnnnnnnnnnnnnnnnnnnnnnnnnnnnnnnnnnnnnnnnnnnnnnnnnnnnnnnnnnnnnnnnnnnnnnnnnnnnnnnnnnnnnnnnnnnnnnnnnnnnnnnnnnnnnnnnnnnnnnnnnnnnnnnnnnnnnnnnnnnnnnnnnnnnnnnnnnnnnnnnnnnnnnnnnnnnnnnnnnnnnnnnnnnnnnnnnnnnnnnnnnnnnnnnnnnnnnnnnnnnnnnnnnnnnnnnnnnnnnnnnnnnnnnnnnnnnnnnnnnnnnnnnnnnnnnnnnnnnnnnnnnnnnnnnnnnnnnnnnnnnnnnnnnnnnnnnnnnnnnnnnnnnnnnnnnnnnnnnnnnnnnnnnnnnnnnnnnnnnnnnnnnnnnnnnnnnnnnnnnnnnnnnnnnnnnnnnnnnnnnnnnnnnnnnnnnnnnnnnnnnnnnnnnnnnnnnnnnnnnnnnnnnnnnnnnnnnnnnnnnnnnnnnnnnnnnnnnnnnnnnnnnnnnnnnnnnnnnnnnnnnnnnnnnnnnnnnnnnnnnnnnnnnnnnnnnnnnnnnnnnnnnnnnnnnnnnnnnnnnnnnnnnnnnnnnnnnnnnnnnnnnnnnnnnnnnnnnnnnnnnnnnnnnnnnnnnnnnnnnnnnnnnnnnnnnnnnnnnnnnnnnnnnnnnnnnnnnnnnnnnnnnnnnnnnnnnnnnnnnnnnnnnnnnnnnnnnnnnnnnnnnnnnnnnnnnnnnnnnnnnnnnnnnnnnnnnnnnnnnnnnnnnnnnnnnnnnnnnnnnnnnnnnnnnnnnnnnnnnnnnnnnnnnnnnnnnnnnnnnnnnnnnnnnnnnnnnnnnnnnnnnnnnnnnnnnnnnnnnnnnnnnnnnnnnnnnnnnnnnnnnnnnnnnnnnnnnnnnnnnnnnnnnnnnnnnnnnnnnnnnnnnnnnnnnnnnnnnnnnnnnnnnnnnnnnnnnnnnnnnnnnnnnnnnnnnnnnnnnnnnnnnnnnnnnnnnnnnnnnnnnnnnnnnnnnnnnnnnnnnnnnnnnnnnnnnnnnnnnnnnnnnnnnnnnnnnnnnnnnnnnnnnnnnnnnnnnnnnnnnnnnnnnnnnnnnnnnnnnnnnnnnnnnnnnnnnnnnnnnnnnnnnnnnnnnnnnnnnnnnnnnnnnnnnnnnnnnnnnnnnnnnnnnnnnnnnnnnnnnnnnnnnnnnnnnnnnnnnnnnnnnnnnnnnnnnnnnnnnnnnnnnnnnnnnnnnnnnnnnnnnnnnnnnnnnnnnnnnnnnnnnnnnnnnnnnnnnnnnnnnnnnnnnnnnnnnnnnnnnnnnnnnnnnnnnnnnnnnnnnnnnnnnnnnnnnnnnnnnnnnnnnnnnnnnnnnnnnnnnnnnnnnnnnnnnnnnnnnnnnnnnnnnnnnnnnnnnnnnnnnnnnnnnnnnnnnnnnnnnnnnnnnnnnnnnnnnnnnnnnnnnnnnnnnnnnnnnnnnnnnnnnnnnnnnnnnnnnnnnnnnnnnnnnnnnnnnnnnnnnnnnnnnnnnnnnnnnnnnnnnnnnnnnnnnnnnnnnnnnnnnnnnnnnnnnnnnnnnnnnnnnnnnnnnnnnnnnnnnnnnnnnnnnnnnnnnnnnnnnnnnnnnnnnnnnnnnnnnnnnnnnnnnnnnnnnnnnnnnnnnnnnnnnnnnnnnnnnnnnnnnnnnnnnnnnnnnnnnnnnnnnnnnnnnnnnnnnnnnnnnnnnnnnnnnnnnnnnnnnnnnnnnnnnnnnnnnnnnnnnnnnnnnnnnnnnnnnnnnnnnnnnnnnnnnnnnnnnnnnnnnnnnnnnnnnnnnnnnnnnnnnnnnnnnnnnnnnnnnnnnnnnnnnnnnnnnnnnnnnnnnnnnnnnnnnnnnnnnnnnnnnnnnnnnnnnnnnnnnnnnnnnnnnnnnnnnnnnnnnnnnnnnnnnnnnnnnnnnnnnnnnnnnnnnnnnnnnnnnnnnnnnnnnnnnnnnnnnnnnnnnnnnnnnnnnnnnnnnnnnnnnnnnnnnnnnnnnnnnnnnnnnnnnnnnnnnnnnnnnnnnnnnnnnnnnnnnnnnnnnnnnnnnnnnnnnnnnnnnnnnnnnnnnnnnnnnnnnnnnnnnnnnnnnnnnnnnnnnnnnnnnnnnnnnnnnnnnnnnnnnnnnnnnnnnnnnnnnnnnnnnnnnnnnnnnnnnnnnnnnnnnnnnnnnnnnnnnnnnnnnnnnnnnnnnnnnnnnnnnnnnnnnnnnnnnnnnnnnnnnnnnnnnnnnnnnnnnnnnnnnnnnnnnnnnnnnnnnnnnnnnnnnnnnnnnnnnnnnnnnnnnnnnnnnnnnnnnnnnnnnnnnnnnnnnnnnnnnnnnnnnnnnnnnnnnnnnnnnnnnnnnnnnnnnnnnnnnnnnnnnnnnnnnnnnnnnnnnnnnnnnnnnnnnnnnnnnnnnnnnnnnnnnnnnnnnnnnnnnnnnnnnnnnnnnnnnnnnnnnnnnnnnnnnnnnnnnnnnnnnnnnnnnnnnnnnnnnnnnnnnnnnnnnnnnnnnnnnnnnnnnnnnnnnnnnnnnnnnnnnnnnnnnnnnnnnnnnnnnnnnnnnnnnnnnnnnnnnnnnnnnnnnnnnnnnnnnnnnnnnnnnnnnnnnnnnnnnnnnnnnnnnnnnnnnnnnnnnnnnnnnnnnnnnnnnnnnnnnnnnnnnnnnnnnnnnnnnnnnnnnnnnnnnnnnnnnnnnnnnnnnnnnnnnnnnnnnnnnnnnnnnnnnnnnnnnnnnnnnnnnnnnnnnnnnnnnnnnnnnnnnnnnnnnnnnnnnnnnnnnnnnnnnnnnnnnnnnnnnnnnnnnnnnnnnnnnnnnnnnnnnnnnnnnnnnnnnnnnnnnnnnnnnnnnnnnnnnnnnnnnnnnnnnnnnnnnnnnnnnnnnnnnnnnnnnnnnnnnnnnnnnnnnnnnnnnnnnnnnnnnnnnnnnnnnnnnnnnnnnnnnnnnnnnnnnnnnnnnnnnnnnnnnnnnnnnnnnnnnnnnnnnnnnnnnnnnnnnnnnnnnnnnnnnnnnnnnnnnnnnnnnnnnnnnnnnnnnnnnnnnnnnnnnnnnnnnnnnnnnnnnnnnnnnnnnnnnnnnnnnnnnnnnnnnnnnnnnnnnnnnnnnnnnnnnnnnnnnnnnnnnnnnnnnnnnnnnnnnnnnnnnnnnnnnnnnnnnnnnnnnnnnnnnnnnnnnnnnnnnnnnnnnnnnnnnnnnnnnnnnnnnnnnnnnnnnnnnnnnnnnnnnnnnnnnnnnnnnnnnnnnnnnnnnnnnnnnnnnnnnnnnnnnnnnnnnnnnnnnnnnnnnnnnnnnnnnnnnnnnnnnnnnnnnnnnnnnnnnnnnnnnnnnnnnnnnnnnnnnnnnnnnnnnnnnnnnnnnnnnnnnnnnnnnnnnnnnnnnnnnnnnnnnnnnnnnnnnnnnnnnnnnnnnnnnnnnnnnnnnnnnnnnnnnnnnnnnnnnnnnnnnnnnnnnnnnnnnnnnnnnnnnnnnnnnnnnnnnnnnnnnnnnnnnnnnnnnnnnnnnnnnnnnnnnnnnnnnnnnnnnnnnnnnnnnnnnnnnnnnnnnnnnnnnnnnnnnnnnnnnnnnnnnnnnnnnnnnnnnnnnnnnnnnnnnnnnnnnnnnnnnnnnnnnnnnnnnnnnnnnnnnnnnnnnnnnnnnnnnnnnnnnnnnnnnnnnnnnnnnnnnnnnnnnnnnnnnnnnnnnnnnnnnnnnnnnnnnnnnnnnnnnnnnnnnnnnnnnnnnnnnnnnnnnnnnnnnnnnnnnnnnnnnnnnnnnnnnnnnnnnnnnnnnnnnnnnnnnnnnnnnnnnnnnnnnnnnnnnnnnnnnnnnnnnnnnnnnnnnnnnnnnnnnnnnnnnnnnnnnnnnnnnnnnnnnnnnnnnnnnnnnnnnnnnnnnnnnnnnnnnnnnnnnnnnnnnnnnnnnnnnnnnnnnnnnnnnnnnnnnnnnnnnnnnnnnnnnnnnnnnnnnnnnnnnnnnnnnnnnnnnnnnnnnnnnnnnnnnnnnnnnnnnnnnnnnnnnnnnnnnnnnnnnnnnnnnnnnnnnnnnnnnnnnnnnnnnnnnnnnnnnnnnnnnnnnnnnnnnnnnnnnnnnnnnnnnnnnnnnnnnnnnnnnnnnnnnnnnnnnnnnnnnnnnnnnnnnnnnnnnnnnnnnnnnnnnnnnnnnnnnnnnnnnnnnnnnnnnnnnnnnnnnnnnnnnnnnnnnnnnnnnnnnnnnnnnnnnnnnnnnnnnnnnnnnnnnnnnnnnnnnnnnnnnnnnnnnnnnnnnnnnnnnnnnnnnnnnnnnnnnnnnnnnnnnnnnnnnnnnnnnnnnnnnnnnnnnnnnnnnnnnnnnnnnnnnnnnnnnnnnnnnnnnnnnnnnnnnnnnnnnnnnnnnnnnnnnnnnnnnnnnnnnnnnnnnnnnnnnnnnnnnnnnnnnnnnnnnnnnnnnnnnnnnnnnnnnnnnnnnnnnnnnnnnnnnnnnnnnnnnnnnnnnnnnnnnnnnnnnnnnnnnnnnnnnnnnnnnnnnnnnnnnnnnnnnnnnnnnnnnnnnnnnnnnnnnnnnnnnnnnnnnnnnnnnnnnnnnnnnnnnnnnnnnnnnnnnnnnnnnnnnnnnnnnnnnnnnnnnnnnnnnnnnnnnnnnnnnnnnnnnnnnnnnnnnnnnnnnnnnnnnnnnnnnnnnnnnnnnnnnnnnnnnnnnnnnnnnnnnnnnnnnnnnnnnnnnnnnnnnnnnnnnnnnnnnnnnnnnnnnnnnnnnnnnnnnnnnnnnnnnnnnnnnnnnnnnnnnnnnnnnnnnnnnnnnnnnnnnnnnnnnnnnnnnnnnnnnnnnnnnnnnnnnnnnnnnnnnnnnnnnnnnnnnnnnnnnnnnnnnnnnnnnnnnnnnnnnnnnnnnnnnnnnnnnnnnnnnnnnnnnnnnnnnnnnnnnnnnnnnnnnnnnnnnnnnnnnnnnnnnnnnnnnnnnnnnnnnnnnnnnnnnnnnnnnnnnnnnnnnnnnnnnnnnnnnnnnnnnnnnnnnnnnnnnnnnnnnnnnnnnnnnnnnnnnnnnnnnnnnnnnnnnnnnnnnnnnnnnnnnnnnnnnnnnnnnnnnnnnnnnnnnnnnnnnnnnnnnnnnnnnnnnnnnnnnnnnnnnnnnnnnnnnnnnnnnnnnnnnnnnnnnnnnnnnnnnnnnnnnnnnnnnnnnnnnnnnnnnnnnnnnnnnnnnnnnnnnnnnnnnnnnnnnnnnnnnnnnnnnnnnnnnnnnnnnnnnnnnnnnnnnnnnnnnnnnnnnnnnnnnnnnnnnnnnnnnnnnnnnnnnnnnnnnnnnnnnnnnnnnnnnnnnnnnnnnnnnnnnnnnnnnnnnnnnnnnnnnnnnnnnnnnnnnnnnnnnnnnnnnnnnnnnnnnnnnnnnnnnnnnnnnnnnnnnnnnnnnnnnnnnnnnnnnnnnnnnnnnnnnnnnnnnnnnnnnnnnnnnnnnnnnnnnnnnnnnnnnnnnnnnnnnnnnnnnnnnnnnnnnnnnnnnnnnnnnnnnnnnnnnnnnnnnnnnnnnnnnnnnnnnnnnnnnnnnnnnnnnnnnnnnnnnnnnnnnnnnnnnnnnnnnnnnnnnnnnnnnnnnnnnnnnnnnnnnnnnnnnnnnnnnnnnnnnnnnnnnnnnnnnnnnnnnnnnnnnnnnnnnnnnnnnnnnnnnnnnnnnnnnnnnnnnnnnnnnnnnnnnnnnnnnnnnnnnnnnnnnnnnnnnnnnnnnnnnnnnnnnnnnnnnnnnnnnnnnnnnnnnnnnnnnnnnnnnnnnnnnnnnnnnnnnnnnnnnnnnnnnnnnnnnnnnnnnnnnnnnnnnnnnnnnnnnnnnnnnnnnnnnnnnnnnnnnnnnnnnnnnnnnnnnnnnnnnnnnnnnnnnnnnnnnnnnnnnnnnnnnnnnnnnnnnnnnnnnnnnnnnnnnnnnnnnnnnnnnnnnnnnnnnnnnnnnnnnnnnnnnnnnnnnnnnnnnnnnnnnnnnnnnnnnnnnnnnnnnnnnnnnnnnnnnnnnnnnnnnnnnnnnnnnnnnnnnnnnnnnnnnnnnnnnnnnnnnnnnnnnnnnnnnnnnnnnnnnnnnnnnnnnnnnnnnnnnnnnnnnnnnnnnnnnnnnnnnnnnnnnnnnnnnnnnnnnnnnnnnnnnnnnnnnnnnnnnnnnnnnnnnnnnnnnnnnnnnnnnnnnnnnnnnnnnnnnnnnnnnnnnnnnnnnnnnnnnnnnnnnnnnnnnnnnnnnnnnnnnnnnnnnnnnnnnnnnnnnnnnnnnnnnnnnnnnnnnnnnnnnnnnnnnnnnnnnnnnnnnnnnnnnnnnnnnnnnnnnnnnnnnnnnnnnnnnnnnnnnnnnnnnnnnnnnnnnnnnnnnnnnnnnnnnnnnnnnnnnnnnnnnnnnnnnnnnnnnnnnnnnnnnnnnnnnnnnnnnnnnnnnnnnnnnnnnnnnnnnnnnnnnnnnnnnnnnnnnnnnnnnnnnnnnnnnnnnnnnnnnnnnnnnnnnnnnnnnnnnnnnnnnnnnnnnnnnnnnnnnnnnnnnnnnnnnnnnnnnnnnnnnnnnnnnnnnnnnnnnnnnnnnnnnnnnnnnnnnnnnnnnnnnnnnnnnnnnnnnnnnnnnnnnnnnnnnnnnnnnnnnnnnnnnnnnnnnnnnnnnnnnnnnnnnnnnnnnnnnnnnnnnnnnnnnnnnnnnnnnnnnnnnnnnnnnnnnnnnnnnnnnnnnnnnnnnnnnnnnnnnnnnnnnnnnnnnnnnnnnnnnnnnnnnnnnnnnnnnnnnnnnnnnnnnnnnnnnnnnnnnnnnnnnnnnnnnnnnnnnnnnnnnnnnnnnnnnnnnnnnnnnnnnnnnnnnnnnnnnnnnnnnnnnnnnnnnnnnnnnnnnnnnnnnnnnnnnnnnnnnnnnnnnnnnnnnnnnnnnnnnnnnnnnnnnnnnnnnnnnnnnnnnnnnnnnnnnnnnnnnnnnnnnnnnnnnnnnnnnnnnnnnnnnnnnnnnnnnnnnnnnnnnnnnnnnnnnnnnnnnnnnnnnnnnnnnnnnnnnnnnnnnnnnnnnnnnnnnnnnnnnnnnnnnnnnnnnnnnnnnnnnnnnnnnnnnnnnnnnnnnnnnnnnnnnnnnnnnnnnnnnnnnnnnnnnnnnnnnnnnnnnnnnnnnnnnnnnnnnnnnnnnnnnnnnnnnnnnnnnnnnnnnnnnnnnnnnnnnnnnnnnnnnnnnnnnnnnnnnnnnnnnnnnnnnnnnnnnnnnnnnnnnnnnnnnnnnnnnnnnnnnnnnnnnnnnnnnnnnnnnnnnnnnnnnnnnnnnnnnnnnnnnnnnnnnnnnnnnnnnnnnnnnnnnnnnnnnnnnnnnnnnnnnnnnnnnnnnnnnnnnnnnnnnnnnnnnnnnnnnnnnnnnnnnnnnnnnnnnnnnnnnnnnnnnnnnnnnnnnnnnnnnnnnnnnnnnnnnnnnnnnnnnnnnnnnnnnnnnnnnnnnnnnnnnnnnnnnnnnnnnnnnnnnnnnnnnnnnnnnnnnnnnnnnnnnnnnnnnnnnnnnnnnnnnnnnnnnnnnnnnnnnnnnnnnnnnnnnnnnnnnnnnnnnnnnnnnnnnnnnnnnnnnnnnnnnnnnnnnnnnnnnnnnnnnnnnnnnnnnnnnnnnnnnnnnnnnnnnnnnnnnnnnnnnnnnnnnnnnnnnnnnnnnnnnnnnnnnnnnnnnnnnnnnnnnnnnnnnnnnnnnnnnnnnnnnnnnnnnnnnnnnnnnnnnnnnnnnnnnnnnnnnnnnnnnnnnnnnnnnnnnnnnnnnnnnnnnnnnnnnnnnnnnnnnnnnnnnnnnnnnnnnnnnnnnnnnnnnnnnnnnnnnnnnnnnnnnnnnnnnnnnnnnnnnnnnnnnnnnnnnnnnnnnnnnnnnnnnnnnnnnnnnnnnnnnnnnnnnnnnnnnnnnnnnnnnnnnnnnnnnnnnnnnnnnnnnnnnnnnnnnnnnnnnnnnnnnnnnnnnnnnnnnnnnnnnnnnnnnnnnnnnnnnnnnnnnnnnnnnnnnnnnnnnnnnnnnnnnnnnnnnnnnnnnnnnnnnnnnnnnnnnnnnnnnnnnnnnnnnnnnnnnnnnnnnnnnnnnnnnnnnnnnnnnnnnnnnnnnnnnnnnnnnnnnnnnnnnnnnnnnnnnnnnnnnnnnnnnnnnnnnnnnnnnnnnnnnnnnnnnnnnnnnnnnnnnnnnnnnnnnnnnnnnnnnnnnnnnnnnnnnnnnnnnnnnnnnnnnnnnnnnnnnnnnnnnnnnnnnnnnnnnnnnnnnnnnnnnnnnnnnnnnnnnnnnnnnnnnnnnnnnnnnnnnnnnnnnnnnnnnnnnnnnnnnnnnnnnnnnnnnnnnnnnnnnnnnnnnnnnnnnnnnnnnnnnnnnnnnnnnnnnnnnnnnnnnnnnnnnnnnnnnnnnnnnnnnnnnnnnnnnnnnnnnnnnnnnnnnnnnnnnnnnnnnnnnnnnnnnnnnnnnnnnnnnnnnnnnnnnnnnnnnnnnnnnnnnnnnnnnnnnnnnnnnnnnnnnnnnnnnnnnnnnnnnnnnnnnnnnnnnnnnnnnnnnnnnnnnnnnnnnnnnnnnnnnnnnnnnnnnnnnnnnnnnnnnnnnnnnnnnnnnnnnnnnnnnnnnnnnnnnnnnnnnnnnnnnnnnnnnnnnnnnnnnnnnnnnnnnnnnnnnnnnnnnnnnnnnnnnnnnnnnnnnnnnnnnnnnnnnnnnnnnnnnnnnnnnnnnnnnnnnnnnnnnnnnnnnnnnnnnnnnnnnnnnnnnnnnnnnnnnnnnnnnnnnnnnnnnnnnnnnnnnnnnnnnnnnnnnnnnnnnnnnnnnnnnnnnnnnnnnnnnnnnnnnnnnnnnnnnnnnnnnnnnnnnnnnnnnnnnnnnnnnnnnnnnnnnnnnnnnnnnnnnnnnnnnnnnnnnnnnnnnnnnnnnnnnnnnnnnnnnnnnnnnnnnnnnnnnnnnnnnnnnnnnnnnnnnnnnnnnnnnnnnnnnnnnnnnnnnnnnnnnnnnnnnnnnnnnnnnnnnnnnnnnnnnnnnnnnnnnnnnnnnnnnnnnnnnnnnnnnnnnnnnnnnnnnnnnnnnnnnnnnnnnnnnnnnnnnnnnnnnnnnnnnnnnnnnnnnnnnnnnnnnnnnnnnnnnnnnnnnnnnnnnnnnnnnnnnnnnnnnnnnnnnnnnnnnnnnnnnnnnnnnnnnnnnnnnnnnnnnnnnnnnnnnnnnnnnnnnnnnnnnnnnnnnnnnnnnnnnnnnnnnnnnnnnnnnnnnnnnnnnnnnnnnnnnnnnnnnnnnnnnnnnnnnnnnnnnnnnnnnnnnnnnnnnnnnnnnnnnnnnnnnnnnnnnnnnnnnnnnnnnnnnnnnnnnnnnnnnnnnnnnnnnnnnnnnnnnnnnnnnnnnnnnnnnnnnnnnnnnnnnnnnnnnnnnnnnnnnnnnnnnnnnnnnnnnnnnnnnnnnnnnnnnnnnnnnnnnnnnnnnnnnnnnnnnnnnnnnnnnnnnnnnnnnnnnnnnnnnnnnnnnnnnnnnnnnnnnnnnnnnnnnnnnnnnnnnnnnnnnnnnnnnnnnnnnnnnnnnnnnnnnnnnnnnnnnnnnnnnnnnnnnnnnnnnnnnnnnnnnnnnnnnnnnnnnnnnnnnnnnnnnnnnnnnnnnnnnnnnnnnnnnnnnnnnnnnnnnnnnnnnnnnnnnnnnnnnnnnnnnnnnnnnnnnnnnnnnnnnnnnnnnnnnnnnnnnnnnnnnnnnnnnnnnnnnnnnnnnnnnnnnnnnnnnnnnnnnnnnnnnnnnnnnnnnnnnnnnnnnnnnnnnnnnnnnnnnnnnnnnnnnnnnnnnnnnnnnnnnnnnnnnnnnnnnnnnnnnnnnnnnnnnnnnnnnnnnnnnnnnnnnnnnnnnnnnnnnnnnnnnnnnnnnnnnnnnnnnnnnnnnnnnnnnnnnnnnnnnnnnnnnnnnnnnnnnnnnnnnnnnnnnnnnnnnnnnnnnnnnnnnnnnnnnnnnnnnnnnnnnnnnnnnnnnnnnnnnnnnnnnnnnnnnnnnnnnnnnnnnnnnnnnnnnnnnnnnnnnnnnnnnnnnnnnnnnnnnnnnnnnnnnnnnnnnnnnnnnnnnnnnnnnnnnnnnnnnnnnnnnnnnnnnnnnnnnnnnnnnnnnnnnnnnnnnnnnnnnnnnnnnnnnnnnnnnnnnnnnnnnnnnnnnnnnnnnnnnnnnnnnnnnnnnnnnnnnnnnnnnnnnnnnnnnnnnnnnnnnnnnnnnnnnnnnnnnnnnnnnnnnnnnnnnnnnnnnnnnnnnnnnnnnnnnnnnnnnnnnnnnnnnnnnnnnnnnnnnnnnnnnnnnnnnnnnnnnnnnnnnnnnnnnnnnnnnnnnnnnnnnnnnnnnnnnnnnnnnnnnnnnnnnnnnnnnnnnnnnnnnnnnnnnnnnnnnnnnnnnnnnnnnnnnnnnnnnnnnnnnnnnnnnnnnnnnnnnnnnnnnnnnnnnnnnnnnnnnnnnnnnnnnnnnnnnnnnnnnnnnnnnnnnnnnnnnnnnnnnnnnnnnnnnnnnnnnnnnnnnnnnnnnnnnnnnnnnnnnnnnnnnnnnnnnnnnnnnnnnnnnnnnnnnnnnnnnnnnnnnnnnnnnnnnnnnnnnnnnnnnnnnnnnnnnnnnnnnnnnnnnnnnnnnnnnnnnnnnnnnnnnnnnnnnnnnnnnnnnnnnnnnnnnnnnnnnnnnnnnnnnnnnnnnnnnnnnnnnnnnnnnnnnnnnnnnnnnnnnnnnnnnnnnnnnnnnnnnnnnnnnnnnnnnnnnnnnnnnnnnnnnnnnnnnnnnnnnnnnnnnnnnnnnnnnnnnnnnnnnnnnnnnnnnnnnnnnnnnnnnnnnnnnnnnnnnnnnnnnnnnnnnnnnnnnnnnnnnnnnnnnnnnnnnnnnnnnnnnnnnnnnnnnnnnnnnnnnnnnnnnnnnnnnnnnnnnnnnnnnnnnnnnnnnnnnnnnnnnnnnnnnnnnnnnnnnnnnnnnnnnnnnnnnnnnnnnnnnnnnnnnnnnnnnnnnnnnnnnnnnnnnnnnnnnnnnnnnnnnnnnnnnnnnnnnnnnnnnnnnnnnnnnnnnnnnnnnnnnnnnnnnnnnnnnnnnnnnnnnnnnnnnnnnnnnnnnnnnnnnnnnnnnnnnnnnnnnnnnnnnnnnnnnnnnnnnnnnnnnnnnnnnnnnnnnnnnnnnnnnnnnnnnnnnnnnnnnnnnnnnnnnnnnnnnnnnnnnnnnnnnnnnnnnnnnnnnnnnnnnnnnnnnnnnnnnnnnnnnnnnnnnnnnnnnnnnnnnnnnnnnnnnnnnnnnnnnnnnnnnnnnnnnnnnnnnnnnnnnnnnnnnnnnnnnnnnnnnnnnnnnnnnnnnnnnnnnnnnnnnnnnnnnnnnnnnnnnnnnnnnnnnnnnnnnnnnnnnnnnnnnnnnnnnnnnnnnnnnnnnnnnnnnnnnnnnnnnnnnnnnnnnnnnnnnnnnnnnnnnnnnnnnnnnnnnnnnnnnnnnnnnnnnnnnnnnnnnnnnnnnnnnnnnnnnnnnnnnnnnnnnnnnnnnnnnnnnnnnnnnnnnnnnnnnnnnnnnnnnnnnnnnnnnnnnnnnnnnnnnnnnnnnnnnnnnnnnnnnnnnnnnnnnnnnnnnnnnnnnnnnnnnnnnnnnnnnnnnnnnnnnnnnnnnnnnnnnnnnnnnnnnnnnnnnnnnnnnnnnnnnnnnnnnnnnnnnnnnnnnnnnnnnnnnnnnnnnnnnnnnnnnnnnnnnnnnnnnnnnnnnnnnnnnnnnnnnnnnnnnnnnnnnnnnnnnnnnnnnnnnnnnnnnnnnnnnnnnnnnnnnnnnnnnnnnnnnnnnnnnnnnnnnnnnnnnnnnnnnnnnnnnnnnnnnnnnnnnnnnnnnnnnnnnnnnnnnnnnnnnnnnnnnnnnnnnnnnnnnnnnnnnnnnnnnnnnnnnnnnnnnnnnnnnnnnnnnnnnnnnnnnnnnnnnnnnnnnnnnnnnnnnnnnnnnnnnnnnnnnnnnnnnnnnnnnnnnnnnnnnnnnnnnnnnnnnnnnnnnnnnnnnnnnnnnnnnnnnnnnnnnnnnnnnnnnnnnnnnnnnnnnnnnnnnnnnnnnnnnnnnnnnnnnnnnnnnnnnnnnnnnnnnnnnnnnnnnnnnnnnnnnnnnnnnnnnnnnnnnnnnnnnnnnnnnnnnnnnnnnnnnnnnnnnnnnnnnnnnnnnnnnnnnnnnnnnnnnnnnnnnnnnnnnnnnnnnnnnnnnnnnnnnnnnnnnnnnnnnnnnnnnnnnnnnnnnnnnnnnnnnnnnnnnnnnnnnnnnnnnnnnnnnnnnnnnnnnnnnnnnnnnnnnnnnnnnnnnnnnnnnnnnnnnnnnnnnnnnnnnnnnnnnnnnnnnnnnnnnnnnnnnnnnnnnnnnnnnnnnnnnnnnnnnnnnnnnnnnnnnnnnnnnnnnnnnnnnnnnnnnnnnnnnnnnnnnnnnnnnnnnnnnnnnnnnnnnnnnnnnnnnnnnnnnnnnnnnnnnnnnnnnnnnnnnnnnnnnnnnnnnnnnnnnnnnnnnnnnnnnnnnnnnnnnnnnnnnnnnnnnnnnnnnnnnnnnnnnnnnnnnnnnnnnnnnnnnnnnnnnnnnnnnnnnnnnnnnnnnnnnnnnnnnnnnnnnnnnnnnnnnnnnnnnnnnnnnnnnnnnnnnnnnnnnnnnnnnnnnnnnnnnnnnnnnnnnnnnnnnnnnnnnnnnnnnnnnnnnnnnnnnnnnnnnnnnnnnnnnnnnnnnnnnnnnnnnnnnnnnnnnnnnnnnnnnnnnnnnnnnnnnnnnnnnnnnnnnnnnnnnnnnnnnnnnnnnnnnnnnnnnnnnnnnnnnnnnnnnnnnnnnnnnnnnnnnnnnnnnnnnnnnnnnnnnnnnnnnnnnnnnnnnnnnnnnnnnnnnnnnnnnnnnnnnnnnnnnnnnnnnnnnnnnnnnnnnnnnnnnnnnnnnnnnnnnnnnnnnnnnnnnnnnnnnnnnnnnnnnnnnnnnnnnnnnnnnnnnnnnnnnnnnnnnnnnnnnnnnnnnnnnnnnnnnnnnnnnnnnnnnnnnnnnnnnnnnnnnnnnnnnnnnnnnnnnnnnnnnnnnnnnnnnnnnnnnnnnnnnnnnnnnnnnnnnnnnnnnnnnnnnnnnnnnnnnnnnnnnnnnnnnnnnnnnnnnnnnnnnnnnnnnnnnnnnnnnnnnnnnnnnnnnnnnnnnnnnnnnnnnnnnnnnnnnnnnnnnnnnnnnnnnnnnnnnnnnnnnnnnnnnnnnnnnnnnnnnnnnnnnnnnnnnnnnnnnnnnnnnnnnnnnnnnnnnnnnnnnnnnnnnnnnnnnnnnnnnnnnnnnnnnnnnnnnnnnnnnnnnnnnnnnnnnnnnnnnnnnnnnnnnnnnnnnnnnnnnnnnnnnnnnnnnnnnnnnnnnnnnnnnnnnnnnnnnnnnnnnnnnnnnnnnnnnnnnnnnnnnnnnnnnnnnnnnnnnnnnnnnnnnnnnnnnnnnnnnnnnnnnnnnnnnnnnnnnnnnnnnnnnnnnnnnnnnnnnnnnnnnnnnnnnnnnnnnnnnnnnnnnnnnnnnnnnnnnnnnnnnnnnnnnnnnnnnnnnnnnnnnnnnnnnnnnnnnnnnnnnnnnnnnnnnnnnnnnnnnnnnnnnnnnnnnnnnnnnnnnnnnnnnnnnnnnnnnnnnnnnnnnnnnnnnnnnnnnnnnnnnnnnnnnnnnnnnnnnnnnnnnnnnnnnnnnnnnnnnnnnnnnnnnnnnnnnnnnnnnnnnnnnnnnnnnnnnnnnnnnnnnnnnnnnnnnnnnnnnnnnnnnnnnnnnnnnnnnnnnnnnnnnnnnnnnnnnnnnnnnnnnnnnnnnnnnnnnnnnnnnnnnnnnnnnnnnnnnnnnnnnnnnnnnnnnnnnnnnnnnnnnnnnnnnnnnnnnnnnnnnnnnnnnnnnnnnnnnnnnnnnnnnnnnnnnnnnnnnnnnnnnnnnnnnnnnnnnnnnnnnnnnnnnnnnnnnnnnnnnnnnnnnnnnnnnnnnnnnnnnnnnnnnnnnnnnnnnnnnnnnnnnnnnnnnnnnnnnnnnnnnnnnnnnnnnnnnnnnnnnnnnnnnnnnnnnnnnnnnnnnnnnnnnnnnnnnnnnnnnnnnnnnnnnnnnnnnnnnnnnnnnnnnnnnnnnnnnnnnnnnnnnnnnnnnnnnnnnnnnnnnnnnnnnnnnnnnnnnnnnnnnnnnnnnnnnnnnnnnnnnnnnnnnnnnnnnnnnnnnnnnnnnnnnnnnnnnnnnnnnnnnnnnnnnnnnnnnnnnnnnnnnnnnnnnnnnnnnnnnnnnnnnnnnnnnnnnnnnnnnnnnnnnnnnnnnnnnnnnnnnnnnnnnnnnnnnnnnnnnnnnnnnnnnnnnnnnnnnnnnnnnnnnnnnnnnnnnnnnnnnnnnnnnnnnnnnnnnnnnnnnnnnnnnnnnnnnnnnnnnnnnnnnnnnnnnnnnnnnnnnnnnnnnnnnnnnnnnnnnnnnnnnnnnnnnnnnnnnnnnnnnnnnnnnnnnnnnnnnnnnnnnnnnnnnnnnnnnnnnnnnnnnnnnnnnnnnnnnnnnnnnnnnnnnnnnnnnnnnnnnnnnnnnnnnnnnnnnnnnnnnnnnnnnnnnnnnnnnnnnnnnnnnnnnnnnnnnnnnnnnnnnnnnnnnnnnnnnnnnnnnnnnnnnnnnnnnnnnnnnnnnnnnnnnnnnnnnnnnnnnnnnnnnnnnnnnnnnnnnnnnnnnnnnnnnnnnnnnnnnnnnnnnnnnnnnnnnnnnnnnnnnnnnnnnnnnnnnnnnnnnnnnnnnnnnnnnnnnnnnnnnnnnnnnnnnnnnnnnnnnnnnnnnnnnnnnnnnnnnnnnnnnnnnnnnnnnnnnnnnnnnnnnnnnnnnnnnnnnnnnnnnnnnnnnnnnnnnnnnnnnnnnnnnnnnnnnnnnnnnnnnnnnnnnnnnnnnnnnnnnnnnnnnnnnnnnnnnnnnnnnnnnnnnnnnnnnnnnnnnnnnnnnnnnnnnnnnnnnnnnnnnnnnnnnnnnnnnnnnnnnnnnnnnnnnnnnnnnnnnnnnnnnnnnnnnnnnnnnnnnnnnnnnnnnnnnnnnnnnnnnnnnnnnnnnnnnnnnnnnnnnnnnnnnnnnnnnnnnnnnnnnnnnnnnnnnnnnnnnnnnnnnnnnnnnnnnnnnnnnnnnnnnnnnnnnnnnnnnnnnnnnnnnnnnnnnnnnnnnnnnnnnnnnnnnnnnnnnnnnnnnnnnnnnnnnnnnnnnnnnnnnnnnnnnnnnnnnnnnnnnnnnnnnnnnnnnnnnnnnnnnnnnnnnnnnnnnnnnnnnnnnnnnnnnnnnnnnnnnnnnnnnnnnnnnnnnnnnnnnnnnnnnnnnnnnnnnnnnnnnnnnnnnnnnnnnnnnnnnnnnnnnnnnnnnnnnnnnnnnnnnnnnnnnnnnnnnnnnnnnnnnnnnnnnnnnnnnnnnnnnnnnnnnnnnnnnnnnnnnnnnnnnnnnnnnnnnnnnnnnnnnnnnnnnnnnnnnnnnnnnnnnnnnnnnnnnnnnnnnnnnnnnnnnnnnnnnnnnnnnnnnnnnnnnnnnnnnnnnnnnnnnnnnnnnnnnnnnnnnnnnnnnnnnnnnnnnnnnnnnnnnnnnnnnnnnnnnnnnnnnnnnnnnnnnnnnnnnnnnnnnnnnnnnnnnnnnnnnnnnnnnnnnnnnnnnnnnnnnnnnnnnnnnnnnnnnnnnnnnnnnnnnnnnnnnnnnnnnnnnnnnnnnnnnnnnnnnnnnnnnnnnnnnnnnnnnnnnnnnnnnnnnnnnnnnnnnnnnnnnnnnnnnnnnnnnnnnnnnnnnnnnnnnnnnnnnnnnnnnnnnnnnnnnnnnnnnnnnnnnnnnnnnnnnnnnnnnnnnnnnnnnnnnnnnnnnnnnnnnnnnnnnnnnnnnnnnnnnnnnnnnnnnnnnnnnnnnnnnnnnnnnnnnnnnnnnnnnnnnnnnnnnnnnnnnnnnnnnnnnnnnnnnnnnnnnnnnnnnnnnnnnnnnnnnnnnnnnnnnnnnnnnnnnnnnnnnnnnnnnnnnnnnnnnnnnnnnnnnnnnnnnnnnnnnnnnnnnnnnnnnnnnnnnnnnnnnnnnnnnnnnnnnnnnnnnnnnnnnnnnnnnnnnnnnnnnnnnnnnnnnnnnnnnnnnnnnnnnnnnnnnnnnnnnnnnnnnnnnnnnnnnnnnnnnnnnnnnnnnnnnnnnnnnnnnnnnnnnnnnnnnnnnnnnnnnnnnnnnnnnnnnnnnnnnnnnnnnnnnnnnnnnnnnnnnnnnnnnnnnnnnnnnnnnnnnnnnnnnnnnnnnnnnnnnnnnnnnnnnnnnnnnnnnnnnnnnnnnnnnnnnnnnnnnnnnnnnnnnnnnnnnnnnnnnnnnnnnnnnnnnnnnnnnnnnnnnnnnnnnnnnnnnnnnnnnnnnnnnnnnnnnnnnnnnnnnnnnnnnnnnnnnnnnnnnnnnnnnnnnnnnnnnnnnnnnnnnnnnnnnnnnnnnnnnnnnnnnnnnnnnnnnnnnnnnnnnnnnnnnnnnnnnnnnnnnnnnnnnnnnnnnnnnnnnnnnnnnnnnnnnnnnnnnnnnnnnnnnnnnnnnnnnnnnnnnnnnnnnnnnnnnnnnnnnnnnnnnnnnnnnnnnnnnnnnnnnnnnnnnnnnnnnnnnnnnnnnnnnnnnnnnnnnnnnnnnnnnnnnnnnnnnnnnnnnnnnnnnnnnnnnnnnnnnnnnnnnnnnnnnnnnnnnnnnnnnnnnnnnnnnnnnnnnnnnnnnnnnnnnnnnnnnnnnnnnnnnnnnnnnnnnnnnnnnnnnnnnnnnnnnnnnnnnnnnnnnnnnnnnnnnnnnnnnnnnnnnnnnnnnnnnnnnnnnnnnnnnnnnnnnnnnnnnnnnnnnnnnnnnnnnnnnnnnnnnnnnnnnnnnnnnnnnnnnnnnnnnnnnnnnnnnnnnnnnnnnnnnnnnnnnnnnnnnnnnnnnnnnnnnnnnnnnnnnnnnnnnnnnnnnnnnnnnnnnnnnnnnnnnnnnnnnnnnnnnnnnnnnnnnnnnnnnnnnnnnnnnnnnnnnnnnnnnnnnnnnnnnnnnnnnnnnnnnnnnnnnnnnnnnnnnnnnnnnnnnnnnnnnnnnnnnnnnnnnnnnnnnnnnnnnnnnnnnnnnnnnnnnnnnnnnnnnnnnnnnnnnnnnnnnnnnnnnnnnnnnnnnnnnnnnnnnnnnnnnnnnnnnnnnnnnnnnnnnnnnnnnnnnnnnnnnnnnnnnnnnnnnnnnnnnnnnnnnnnnnnnnnnnnnnnnnnnnnnnnnnnnnnnnnnnnnnnnnnnnnnnnnnnnnnnnnnnnnnnnnnnnnnnnnnnnnnnnnnnnnnnnnnnnnnnnnnnnnnnnnnnnnnnnnnnnnnnnnnnnnnnnnnnnnnnnnnnnnnnnnnnnnnnnnnnnnnnnnnnnnnnnnnnnnnnnnnnnnnnnnnnnnnnnnnnnnnnnnnnnnnnnnnnnnnnnnnnnnnnnnnnnnnnnnnnnnnnnnnnnnnnnnnnnnnnnnnnnnnnnnnnnnnnnnnnnnnnnnnnnnnnnnnnnnnnnnnnnnnnnnnnnnnnnnnnnnnnnnnnnnnnnnnnnnnnnnnnnnnnnnnnnnnnnnnnnnnnnnnnnnnnnnnnnnnnnnnnnnnnnnnnnnnnnnnnnnnnnnnnnnnnnnnnnnnnnnnnnnnnnnnnnnnnnnnnnnnnnnnnnnnnnnnnnnnnnnnnnnnnnnnnnnnnnnnnnnnnnnnnnnnnnnnnnnnnnnnnnnnnnnnnnnnnnnnnnnnnnnnnnnnnnnnnnnnnnnnnnnnnnnnnnnnnnnnnnnnnnnnnnnnnnnnnnnnnnnnnnnnnnnnnnnnnnnnnnnnnnnnnnnnnnnnnnnnnnnnnnnnnnnnnnnnnnnnnnnnnnnnnnnnnnnnnnnnnnnnnnnnnnnnnnnnnnnnnnnnnnnnnnnnnnnnnnnnnnnnnnnnnnnnnnnnnnnnnnnnnnnnnnnnnnnnnnnnnnnnnnnnnnnnnnnnnnnnnnnnnnnnnnnnnnnnnnnnnnnnnnnnnnnnnnnnnnnnnnnnnnnnnnnnnnnnnnnnnnnnnnnnnnnnnnnnnnnnnnnnnnnnnnnnnnnnnnnnnnnnnnnnnnnnnnnnnnnnnnnnnnnnnnnnnnnnnnnnnnnnnnnnnnnnnnnnnnnnnnnnnnnnnnnnnnnnnnnnnnnnnnnnnnnnnnnnnnnnnnnnnnnnnnnnnnnnnnnnnnnnnnnnnnnnnnnnnnnnnnnnnnnnnnnnnnnnnnnnnnnnnnnnnnnnnnnnnnnnnnnnnnnnnnnnnnnnnnnnnnnnnnnnnnnnnnnnnnnnnnnnnnnnnnnnnnnnnnnnnnnnnnnnnnnnnnnnnnnnnnnnnnnnnnnnnnnnnnnnnnnnnnnnnnnnnnnnnnnnnnnnnnnnnnnnnnnnnnnnnnnnnnnnnnnnnnnnnnnnnnnnnnnnnnnnnnnnnnnnnnnnnnnnnnnnnnnnnnnnnnnnnnnnnnnnnnnnnnnnnnnnnnnnnnnnnnnnnnnnnnnnnnnnnnnnnnnnnnnnnnnnnnnnnnnnnnnnnnnnnnnnnnnnnnnnnnnnnnnnnnnnnnnnnnnnnnnnnnnnnnnnnnnnnnnnnnnnnnnnnnnnnnnnnnnnnnnnnnnnnnnnnnnnnnnnnnnnnnnnnnnnnnnnnnnnnnnnnnnnnnnnnnnnnnnnnnnnnnnnnnnnnnnnnnnnnnnnnnnnnnnnnnnnnnnnnnnnnnnnnnnnnnnnnnnnnnnnnnnnnnnnnnnnnnnnnnnnnnnnnnnnnnnnnnnnnnnnnnnnnnnnnnnnnnnnnnnnnnnnnnnnnnnnnnnnnnnnnnnnnnnnnnnnnnnnnnnnnnnnnnnnnnnnnnnnnnnnnnnnnnnnnnnnnnnnnnnnnnnnnnnnnnnnnnnnnnnnnnnnnnnnnnnnnnnnnnnnnnnnnnnnnnnnnnnnnnnnnnnnnnnnnnnnnnnnnnnnnnnnnnnnnnnnnnnnnnnnnnnnnnnnnnnnnnnnnnnnnnnnnnnnnnnnnnnnnnnnnnnnnnnnnnnnnnnnnnnnnnnnnnnnnnnnnnnnnnnnnnnnnnnnnnnnnnnnnnnnnnnnnnnnnnnnnnnnnnnnnnnnnnnnnnnnnnnnnnnnnnnnnnnnnnnnnnnnnnnnnnnnnnnnnnnnnnnnnnnnnnnnnnnnnnnnnnnnnnnnnnnnnnnnnnnnnnnnnnnnnnnnnnnnnnnnnnnnnnnnnnnnnnnnnnnnnnnnnnnnnnnnnnnnnnnnnnnnnnnnnnnnnnnnnnnnnnnnnnnnnnnnnnnnnnnnnnnnnnnnnnnnnnnnnnnnnnnnnnnnnnnnnnnnnnnnnnnnnnnnnnnnnnnnnnnnnnnnnnnnnnnnnnnnnnnnnnnnnnnnnnnnnnnnnnnnnnnnnnnnnnnnnnnnnnnnnnnnnnnnnnnnnnnnnnnnnnnnnnnnnnnnnnnnnnnnnnnnnnnnnnnnnnnnnnnnnnnnnnnnnnnnnnnnnnnnnnnnnnnnnnnnnnnnnnnnnnnnnnnnnnnnnnnnnnnnnnnnnnnnnnnnnnnnnnnnnnnnnnnnnnnnnnnnnnnnnnnnnnnnnnnnnnnnnnnnnnnnnnnnnnnnnnnnnnnnnnnnnnnnnnnnnnnnnnnnnnnnnnnnnnnnnnnnnnnnnnnnnnnnnnnnnnnnnnnnnnnnnnnnnnnnnnnnnnnnnnnnnnnnnnnnnnnnnnnnnnnnnnnnnnnnnnnnnnnnnnnnnnnnnnnnnnnnnnnnnnnnnnnnnnnnnnnnnnnnnnnnnnnnnnnnnnnnnnnnnnnnnnnnnnnnnnnnnnnnnnnnnnnnnnnnnnnnnnnnnnnnnnnnnnnnnnnnnnnnnnnnnnnnnnnnnnnnnnnnnnnnnnnnnnnnnnnnnnnnnnnnnnnnnnnnnnnnnnnnnnnnnnnnnnnnnnnnnnnnnnnnnnnnnnnnnnnnnnnnnnnnnnnnnnnnnnnnnnnnnnnnnnnnnnnnnnnnnnnnnnnnnnnnnnnnnnnnnnnnnnnnnnnnnnnnnnnnnnnnnnnnnnnnnnnnnnnnnnnnnnnnnnnnnnnnnnnnnnnnnnnnnnnnnnnnnnnnnnnnnnnnnnnnnnnnnnnnnnnnnnnnnnnnnnnnnnnnnnnnnnnnnnnnnnnnnnnnnnnnnnnnnnnnnnnnnnnnnnnnnnnnnnnnnnnnnnnnnnnnnnnnnnnnnnnnnnnnnnnnnnnnnnnnnnnnnnnnnnnnnnnnnnnnnnnnnnnnnnnnnnnnnnnnnnnnnnnnnnnnnnnnnnnnnnnnnnnnnnnnnnnnnnnnnnnnnnnnnnnnnnnnnnnnnnnnnnnnnnnnnnnnnnnnnnnnnnnnnnnnnnnnnnnnnnnnnnnnnnnnnnnnnnnnnnnnnnnnnnnnnnnnnnnnnnnnnnnnnnnnnnnnnnnnnnnnnnnnnnnnnnnnnnnnnnnnnnnnnnnnnnnnnnnnnnnnnnnnnnnnnnnnnnnnnnnnnnnnnnnnnnnnnnnnnnnnnnnnnnnnnnnnnnnnnnnnnnnnnnnnnnnnnnnnnnnnnnnnnnnnnnnnnnnnnnnnnnnnnnnnnnnnnnnnnnnnnnnnnnnnnnnnnnnnnnnnnnnnnnnnnnnnnnnnnnnnnnnnnnnnnnnnnnnnnnnnnnnnnnnnnnnnnnnnnnnnnnnnnnnnnnnnnnnnnnnnnnnnnnnnnnnnnnnnnnnnnnnnnnnnnnnnnnnnnnnnnnnnnnnnnnnnnnnnnnnnnnnnnnnnnnnnnnnnnnnnnnnnnnnnnnnnnnnnnnnnnnnnnnnnnnnnnnnnnnnnnnnnnnnnnnnnnnnnnnnnnnnnnnnnnnnnnnnnnnnnnnnnnnnnnnnnnnnnnnnnnnnnnnnnnnnnnnnnnnnnnnnnnnnnnnnnnnnnnnnnnnnnnnnnnnnnnnnnnnnnnnnnnnnnnnnnnnnnnnnnnnnnnnnnnnnnnnnnnnnnnnnnnnnnnnnnnnnnnnnnnnnnnnnnnnnnnnnnnnnnnnnnnnnnnnnnnnnnnnnnnnnnnnnnnnnnnnnnnnnnnnnnnnnnnnnnnnnnnnnnnnnnnnnnnnnnnnnnnnnnnnnnnnnnnnnnnnnnnnnnnnnnnnnnnnnnnnnnnnnnnnnnnnnnnnnnnnnnnnnnnnnnnnnnnnnnnnnnnnnnnnnnnnnnnnnnnnnnnnnnnnnnnnnnnnnnnnnnnnnnnnnnnnnnnnnnnnnnnnnnnnnnnnnnnnnnnnnnnnnnnnnnnnnnnnnnnnnnnnnnnnnnnnnnnnnnnnnnnnnnnnnnnnnnnnnnnnnnnnnnnnnnnnnnnnnnnnnnnnnnnnnnnnnnnnnnnnnnnnnnnnnnnnnnnnnnnnnnnnnnnnnnnnnnnnnnnnnnnnnnnnnnnnnnnnnnnnnnnnnnnnnnnnnnnnnnnnnnnnnnnnnnnnnnnnnnnnnnnnnnnnnnnnnnnnnnnnnnnnnnnnnnnnnnnnnnnnnnnnnnnnnnnnnnnnnnnnnnnnnnnnnnnnnnnnnnnnnnnnnnnnnnnnnnnnnnnnnnnnnnnnnnnnnnnnnnnnnnnnnnnnnnnnnnnnnnnnnnnnnnnnnnnnnnnnnnnnnnnnnnnnnnnnnnnnnnnnnnnnnnnnnnnnnnnnnnnnnnnnnnnnnnnnnnnnnnnnnnnnnnnnnnnnnnnnnnnnnnnnnnnnnnnnnnnnnnnnnnnnnnnnnnnnnnnnnnnnnnnnnnnnnnnnnnnnnnnnnnnnnnnnnnnnnnnnnnnnnnnnnnnnnnnnnnnnnnnnnnnnnnnnnnnnnnnnnnnnnnnnnnnnnnnnnnnnnnnnnnnnnnnnnnnnnnnnnnnnnnnnnnnnnnnnnnnnnnnnnnnnnnnnnnnnnnnnnnnnnnnnnnnnnnnnnnnnnnnnnnnnnnnnnnnnnnnnnnnnnnnnnnnnnnnnnnnnnnnnnnnnnnnnnnnnnnnnnnnnnnnnnnnnnnnnnnnnnnnnnnnnnnnnnnnnnnnnnnnnnnnnnnnnnnnnnnnnnnnnnnnnnnnnnnnnnnnnnnnnnnnnnnnnnnnnnnnnnnnnnnnnnnnnnnnnnnnnnnnnnnnnnnnnnnnnnnnnnnnnnnnnnnnnnnnnnnnnnnnnnnnnnnnnnnnnnnnnnnnnnnnnnnnnnnnnnnnnnnnnnnnnnnnnnnnnnnnnnnnnnnnnnnnnnnnnnnnnnnnnnnnnnnnnnnnnnnnnnnnnnnnnnnnnnnnnnnnnnnnnnnnnnnnnnnnnnnnnnnnnnnnnnnnnnnnnnnnnnnnnnnnnnnnnnnnnnnnnnnnnnnnnnnnnnnnnnnnnnnnnnnnnnnnnnnnnnnnnnnnnnnnnnnnnnnnnnnnnnnnnnnnnnnnnnnnnnnnnnnnnnnnnnnnnnnnnnnnnnnnnnnnnnnnnnnnnnnnnnnnnnnnnnnnnnnnnnnnnnnnnnnnnnnnnnnnnnnnnnnnnnnnnnnnnnnnnnnnnnnnnnnnnnnnnnnnnnnnnnnnnnnnnnnnnnnnnnnnnnnnnnnnnnnnnnnnnnnnnnnnnnnnnnnnnnnnnnnnnnnnnnnnnnnnnnnnnnnnnnnnnnnnnnnnnnnnnnnnnnnnnnnnnnnnnnnnnnnnnnnnnnnnnnnnnnnnnnnnnnnnnnnnnnnnnnnnnnnnnnnnnnnnnnnnnnnnnnnnnnnnnnnnnnnnnnnnnnnnnnnnnnnnnnnnnnnnnnnnnnnnnnnnnnnnnnnnnnnnnnnnnnnnnnnnnnnnnnnnnnnnnnnnnnnnnnnnnnnnnnnnnnnnnnnnnnnnnnnnnnnnnnnnnnnnnnnnnnnnnnnnnnnnnnnnnnnnnnnnnnnnnnnnnnnnnnnnnnnnnnnnnnnnnnnnnnnnnnnnnnnnnnnnnnnnnnnnnnnnnnnnnnnnnnnnnnnnnnnnnnnnnnnnnnnnnnnnnnnnnnnnnnnnnnnnnnnnnnnnnnnnnnnnnnnnnnnnnnnnnnnnnnnnnnnnnnnnnnnnnnnnnnnnnnnnnnnnnnnnnnnnnnnnnnnnnnnnnnnnnnnnnnnnnnnnnnnnnnnnnnnnnnnnnnnnnnnnnnnnnnnnnnnnnnnnnnnnnnnnnnnnnnnnnnnnnnnnnnnnnnnnnnnnnnnnnnnnnnnnnnnnnnnnnnnnnnnnnnnnnnnnnnnnnnnnnnnnnnnnnnnnnnnnnnnnnnnnnnnnnnnnnnnnnnnnnnnnnnnnnnnnnnnnnnnnnnnnnnnnnnnnnnnnnnnnnnnnnnnnnnnnnnnnnnnnnnnnnnnnnnnnnnnnnnnnnnnnnnnnnnnnnnnnnnnnnnnnnnnnnnnnnnnnnnnnnnnnnnnnnnnnnnnnnnnnnnnnnnnnnnnnnnnnnnnnnnnnnnnnnnnnnnnnnnnnnnnnnnnnnnnnnnnnnnnnnnnnnnnnnnnnnnnnnnnnnnnnnnnnnnnnnnnnnnnnnnnnnnnnnnnnnnnnnnnnnnnnnnnnnnnnnnnnnnnnnnnnnnnnnnnnnnnnnnnnnnnnnnnnnnnnnnnnnnnnnnnnnnnnnnnnnnnnnnnnnnnnnnnnnnnnnnnnnnnnnnnnnnnnnnnnnnnnnnnnnnnnnnnnnnnnnnnnnnnnnnnnnnnnnnnnnnnnnnnnnnnnnnnnnnnnnnnnnnnnnnnnnnnnnnnnnnnnnnnnnnnnnnnnnnnnnnnnnnnnnnnnnnnnnnnnnnnnnnnnnnnnnnnnnnnnnnnnnnnnnnnnnnnnnnnnnnnnnnnnnnnnnnnnnnnnnnnnnnnnnnnnnnnnnnnnnnnnnnnnnnnnnnnnnnnnnnnnnnnnnnnnnnnnnnnnnnnnnnnnnnnnnnnnnnnnnnnnnnnnnnnnnnnnnnnnnnnnnnnnnnnnnnnnnnnnnnnnnnnnnnnnnnnnnnnnnnnnnnnnnnnnnnnnnnnnnnnnnnnnnnnnnnnnnnnnnnnnnnnnnnnnnnnnnnnnnnnnnnnnnnnnnnnnnnnnnnnnnnnnnnnnnnnnnnnnnnnnnnnnnnnnnnnnnnnnnnnnnnnnnnnnnnnnnnnnnnnnnnnnnnnnnnnnnnnnnnnnnnnnnnnnnnnnnnnnnnnnnnnnnnnnnnnnnnnnnnnnnnnnnnnnnnnnnnnnnnnnnnnnnnnnnnnnnnnnnnnnnnnnnnnnnnnnnnnnnnnnnnnnnnnnnnnnnnnnnnnnnnnnnnnnnnnnnnnnnnnnnnnnnnnnnnnnnnnnnnnnnnnnnnnnnnnnnnnnnnnnnnnnnnnnnnnnnnnnnnnnnnnnnnnnnnnnnnnnnnnnnnnnnnnnnnnnnnnnnnnnnnnnnnnnnnnnnnnnnnnnnnnnnnnnnnnnnnnnnnnnnnnnnnnnnnnnnnnnnnnnnnnnnnnnnnnnnnnnnnnnnnnnnnnnnnnnnnnnnnnnnnnnnnnnnnnnnnnnnnnnnnnnnnnnnnnnnnnnnnnnnnnnnnnnnnnnnnnnnnnnnnnnnnnnnnnnnnnnnnnnnnnnnnnnnnnnnnnnnnnnnnnnnnnnnnnnnnnnnnnnnnnnnnnnnnnnnnnnnnnnnnnnnnnnnnnnnnnnnnnnnnnnnnnnnnnnnnnnnnnnnnnnnnnnnnnnnnnnnnnnnnnnnnnnnnnnnnnnnnnnnnnnnnnnnnnnnnnnnnnnnnnnnnnnnnnnnnnnnnnnnnnnnnnnnnnnnnnnnnnnnnnnnnnnnnnnnnnnnnnnnnnnnnnnnnnnnnnnnnnnnnnnnnnnnnnnnnnnnnnnnnnnnnnnnnnnnnnnnnnnnnnnnnnnnnnnnnnnnnnnnnnnnnnnnnnnnnnnnnnnnnnnnnnnnnnnnnnnnnnnnnnnnnnnnnnnnnnnnnnnnnnnnnnnnnnnnnnnnnnnnnnnnnnnnnnnnnnnnnnnnnnnnnnnnnnnnnnnnnnnnnnnnnnnnnnnnnnnnnnnnnnnnnnnnnnnnnnnnnnnnnnnnnnnnnnnnnnnnnnnnnnnnnnnnnnnnnnnnnnnnnnnnnnnnnnnnnnnnnnnnnnnnnnnnnnnnnnnnnnnnnnnnnnnnnnnnnnnnnnnnnnnnnnnnnnnnnnnnnnnnnnnnnnnnnnnnnnnnnnnnnnnnnnnnnnnnnnnnnnnnnnnnnnnnnnnnnnnnnnnnnnnnnnnnnnnnnnnnnnnnnnnnnnnnnnnnnnnnnnnnnnnnnnnnnnnnnnnnnnnnnnnnnnnnnnnnnnnnnnnnnnnnnnnnnnnnnnnnnnnnnnnnnnnnnnnnnnnnnnnnnnnnnnnnnnnnnnnnnnnnnnnnnnnnnnnnnnnnnnnnnnnnnnnnnnnnnnnnnnnnnnnnnnnnnnnnnnnnnnnnnnnnnnnnnnnnnnnnnnnnnnnnnnnnnnnnnnnnnnnnnnnnnnnnnnnnnnnnnnnnnnnnnnnnnnnnnnnnnnnnnnnnnnnnnnnnnnnnnnnnnnnnnnnnnnnnnnnnnnnnnnnnnnnnnnnnnnnnnnnnnnnnnnnnnnnnnnnnnnnnnnnnnnnnnnnnnnnnnnnnnnnnnnnnnnnnnnnnnnnnnnnnnnnnnnnnnnnnnnnnnnnnnnnnnnnnnnnnnnnnnnnnnnnnnnnnnnnnnnnnnnnnnnnnnnnnnnnnnnnnnnnnnnnnnnnnnnnnnnnnnnnnnnnnnnnnnnnnnnnnnnnnnnnnnnnnnnnnnnnnnnnnnnnnnnnnnnnnnnnnnnnnnnnnnnnnnnnnnnnnnnnnnnnnnnnnnnnnnnnnnnnnnnnnnnnnnnnnnnnnnnnnnnnnnnnnnnnnnnnnnnnnnnnnnnnnnnnnnnnnnnnnnnnnnnnnnnnnnnnnnnnnnnnnnnnnnnnnnnnnnnnnnnnnnnnnnnnnnnnnnnnnnnnnnnnnnnnnnnnnnnnnnnnnnnnnnnnnnnnnnnnnnnnnnnnnnnnnnnnnnnnnnnnnnnnnnnnnnnnnnnnnnnnnnnnnnnnnnnnnnnnnnnnnnnnnnnnnnnnnnnnnnnnnnnnnnnnnnnnnnnnnnnnnnnnnnnnnnnnnnnnnnnnnnnnnnnnnnnnnnnnnnnnnnnnnnnnnnnnnnnnnnnnnnnnnnnnnnnnnnnnnnnnnnnnnnnnnnnnnnnnnnnnnnnnnnnnnnnnnnnnnnnnnnnnnnnnnnnnnnnnnnnnnnnnnnnnnnnnnnnnnnnnnnnnnnnnnnnnnnnnnnnnnnnnnnnnnnnnnnnnnnnnnnnnnnnnnnnnnnnnnnnnnnnnnnnnnnnnnnnnnnnnnnnnnnnnnnnnnnnnnnnnnnnnnnnnnnnnnnnnnnnnnnnnnnnnnnnnnnnnnnnnnnnnnnnnnnnnnnnnnnnnnnnnnnnnnnnnnnnnnnnnnnnnnnnnnnnnnnnnnnnnnnnnnnnnnnnnnnnnnnnnnnnnnnnnnnnnnnnnnnnnnnnnnnnnnnnnnnnnnnnnnnnnnnnnnnnnnnnnnnnnnnnnnnnnnnnnnnnnnnnnnnnnnnnnnnnnnnnnnnnnnnnnnnnnnnnnnnnnnnnnnnnnnnnnnnnnnnnnnnnnnnnnnnnnnnnnnnnnnnnnnnnnnnnnnnnnnnnnnnnnnnnnnnnnnnnnnnnnnnnnnnnnnnnnnnnnnnnnnnnnnnnnnnnnnnnnnnnnnnnnnnnnnnnnnnnnnnnnnnnnnnnnnnnnnnnnnnnnnnnnnnnnnnnnnnnnnnnnnnnnnnnnnnnnnnnnnnnnnnnnnnnnnnnnnnnnnnnnnnnnnnnnnnnnnnnnnnnnnnnnnnnnnnnnnnnnnnnnnnnnnnnnnnnnnnnnnnnnnnnnnnnnnnnnnnnnnnnnnnnnnnnnnnnnnnnnnnnnnnnnnnnnnnnnnnnnnnnnnnnnnnnnnnnnnnnnnnnnnnnnnnnnnnnnnnnnnnnnnnnnnnnnnnnnnnnnnnnnnnnnnnnnnnnnnnnnnnnnnnnnnnnnnnnnnnnnnnnnnnnnnnnnnnnnnnnnnnnnnnnnnnnnnnnnnnnnnnnnnnnnnnnnnnnnnnnnnnnnnnnnnnnnnnnnnnnnnnnnnnnnnnnnnnnnnnnnnnnnnnnnnnnnnnnnnnnnnnnnnnnnnnnnnnnnnnnnnnnnnnnnnnnnnnnnnnnnnnnnnnnnnnnnnnnnnnnnnnnnnnnnnnnnnnnnnnnnnnnnnnnnnnnnnnnnnnnnnnnnnnnnnnnnnnnnnnnnnnnnnnnnnnnnnnnnnnnnnnnnnnnnnnnnnnnnnnnnnnnnnnnnnnnnnnnnnnnnnnnnnnnnnnnnnnnnnnnnnnnnnnnnnnnnnnnnnnnnnnnnnnnnnnnnnnnnnnnnnnnnnnnnnnnnnnnnnnnnnnnnnnnnnnnnnnnnnnnnnnnnnnnnnnnnnnnnnnnnnnnnnnnnnnnnnnnnnnnnnnnnnnnnnnnnnnnnnnnnnnnnnnnnnnnnnnnnnnnnnnnnnnnnnnnnnnnnnnnnnnnnnnnnnnnnnnnnnnnnnnnnnnnnnnnnnnnnnnnnnnnnnnnnnnnnnnnnnnnnnnnnnnnnnnnnnnnnnnnnnnnnnnnnnnnnnnnnnnnnnnnnnnnnnnnnnnnnnnnnnnnnnnnnnnnnnnnnnnnnnnnnnnnnnnnnnnnnnnnnnnnnnnnnnnnnnnnnnnnnnnnnnnnnnnnnnnnnnnnnnnnnnnnnnnnnnnnnnnnnnnnnnnnnnnnnnnnnnnnnnnnnnnnnnnnnnnnnnnnnnnnnnnnnnnnnnnnnnnnnnnnnnnnnnnnnnnnnnnnnnnnnnnnnnnnnnnnnnnnnnnnnnnnnnnnnnnnnnnnnnnnnnnnnnnnnnnnnnnnnnnnnnnnnnnnnnnnnnnnnnnnnnnnnnnnnnnnnnnnnnnnnnnnnnnnnnnnnnnnnnnnnnnnnnnnnnnnnnnnnnnnnnnnnnnnnnnnnnnnnnnnnnnnnnnnnnnnnnnnnnnnnnnnnnnnnnnnnnnnnnnnnnnnnnnnnnnnnnnnnnnnnnnnnnnnnnnnnnnnnnnnnnnnnnnnnnnnnnnnnnnnnnnnnnnnnnnnnnnnnnnnnnnnnnnnnnnnnnnnnnnnnnnnnnnnnnnnnnnnnnnnnnnnnnnnnnnnnnnnnnnnnnnnnnnnnnnnnnnnnnnnnnnnnnnnnnnnnnnnnnnnnnnnnnnnnnnnnnnnnnnnnnnnnnnnnnnnnnnnnnnnnnnnnnnnnnnnnnnnnnnnnnnnnnnnnnnnnnnnnnnnnnnnnnnnnnnnnnnnnnnnnnnnnnnnnnnnnnnnnnnnnnnnnnnnnnnnnnnnnnnnnnnnnnnnnnnnnnnnnnnnnnnnnnnnnnnnnnnnnnnnnnnnnnnnnnnnnnnnnnnnnnnnnnnnnnnnnnnnnnnnnnnnnnnnnnnnnnnnnnnnnnnnnnnnnnnnnnnnnnnnnnnnnnnnnnnnnnnnnnnnnnnnnnnnnnnnnnnnnnnnnnnnnnnnnnnnnnnnnnnnnnnnnnnnnnnnnnnnnnnnnnnnnnnnnnnnnnnnnnnnnnnnnnnnnnnnnnnnnnnnnnnnnnnnnnnnnnnnnnnnnnnnnnnnnnnnnnnnnnnnnnnnnnnnnnnnnnnnnnnnnnnnnnnnnnnnnnnnnnnnnnnnnnnnnnnnnnnnnnnnnnnnnnnnnnnnnnnnnnnnnnnnnnnnnnnnnnnnnnnnnnnnnnnnnnnnnnnnnnnnnnnnnnnnnnnnnnnnnnnnnnnnnnnnnnnnnnnnnnnnnnnnnnnnnnnnnnnnnnnnnnnnnnnnnnnnnnnnnnnnnnnnnnnnnnnnnnnnnnnnnnnnnnnnnnnnnnnnnnnnnnnnnnnnnnnnnnnnnnnnnnnnnnnnnnnnnnnnnnnnnnnnnnnnnnnnnnnnnnnnnnnnnnnnnnnnnnnnnnnnnnnnnnnnnnnnnnnnnnnnnnnnnnnnnnnnnnnnnnnnnnnnnnnnnnnnnnnnnnnnnnnnnnnnnnnnnnnnnnnnnnnnnnnnnnnnnnnnnnnnnnnnnnnnnnnnnnnnnnnnnnnnnnnnnnnnnnnnnnnnnnnnnnnnnnnnnnnnnnnnnnnnnnnnnnnnnnnnnnnnnnnnnnnnnnnnnnnnnnnnnnnnnnnnnnnnnnnnnnnnnnnnnnnnnnnnnnnnnnnnnnnnnnnnnnnnnnnnnnnnnnnnnnnnnnnnnnnnnnnnnnnnnnnnnnnnnnnnnnnnnnnnnnnnnnnnnnnnnnnnnnnnnnnnnnnnnnnnnnnnnnnnnnnnnnnnnnnnnnnnnnnnnnnnnnnnnnnnnnnnnnnnnnnnnnnnnnnnnnnnnnnnnnnnnnnnnnnnnnnnnnnnnnnnnnnnnnnnnnnnnnnnnnnnnnnnnnnnnnnnnnnnnnnnnnnnnnnnnnnnnnnnnnnnnnnnnnnnnnnnnnnnnnnnnnnnnnnnnnnnnnnnnnnnnnnnnnnnnnnnnnnnnnnnnnnnnnnnnnnnnnnnnnnnnnnnnnnnnnnnnnnnnnnnnnnnnnnnnnnnnnnnnnnnnnnnnnnnnnnnnnnnnnnnnnnnnnnnnnnnnnnnnnnnnnnnnnnnnnnnnnnnnnnnnnnnnnnnnnnnnnnnnnnnnnnnnnnnnnnnnnnnnnnnnnnnnnnnnnnnnnnnnnnnnnnnnnnnnnnnnnnnnnnnnnnnnnnnnnnnnnnnnnnnnnnnnnnnnnnnnnnnnnnnnnnnnnnnnnnnnnnnnnnnnnnnnnnnnnnnnnnnnnnnnnnnnnnnnnnnnnnnnnnnnnnnnnnnnnnnnnnnnnnnnnnnnnnnnnnnnnnnnnnnnnnnnnnnnnnnnnnnnnnnnnnnnnnnnnnnnnnnnnnnnnnnnnnnnnnnnnnnnnnnnnnnnnnnnnnnnnnnnnnnnnnnnnnnnnnnnnnnnnnnnnnnnnnnnnnnnnnnnnnnnnnnnnnnnnnnnnnnnnnnnnnnnnnnnnnnnnnnnnnnnnnnnnnnnnnnnnnnnnnnnnnnnnnnnnnnnnnnnnnnnnnnnnnnnnnnnnnnnnnnnnnnnnnnnnnnnnnnnnnnnnnnnnnnnnnnnnnnnnnnnnnnnnnnnnnnnnnnnnnnnnnnnnnnnnnnnnnnnnnnnnnnnnnnnnnnnnnnnnnnnnnnnnnnnnnnnnnnnnnnnnnnnnnnnnnnnnnnnnnnnnnnnnnnnnnnnnnnnnnnnnnnnnnnnnnnnnnnnnnnnnnnnnnnnnnnnnnnnnnnnnnnnnnnnnnnnnnnnnnnnnnnnnnnnnnnnnnnnnnnnnnnnnnnnnnnnnnnnnnnnnnnnnnnnnnnnnnnnnnnnnnnnnnnnnnnnnnnnnnnnnnnnnnnnnnnnnnnnnnnnnnnnnnnnnnnnnnnnnnnnnnnnnnnnnnnnnnnnnnnnnnnnnnnnnnnnnnnnnnnnnnnnnnnnnnnnnnnnnnnnnnnnnnnnnnnnnnnnnnnnnnnnnnnnnnnnnnnnnnnnnnnnnnnnnnnnnnnnnnnnnnnnnnnnnnnnnnnnnnnnnnnnnnnnnnnnnnnnnnnnnnnnnnnnnnnnnnnnnnnnnnnnnnnnnnnnnnnnnnnnnnnnnnnnnnnnnnnnnnnnnnnnnnnnnnnnnnnnnnnnnnnnnnnnnnnnnnnnnnnnnnnnnnnnnnnnnnnnnnnnnnnnnnnnnnnnnnnnnnnnnnnnnnnnnnnnnnnnnnnnnnnnnnnnnnnnnnnnnnnnnnnnnnnnnnnnnnnnnnnnnnnnnnnnnnnnnnnnnnnnnnnnnnnnnnnnnnnnnnnnnnnnnnnnnnnnnnnnnnnnnnnnnnnnnnnnnnnnnnnnnnnnnnnnnnnnnnnnnnnnnnnnnnnnnnnnnnnnnnnnnnnnnnnnnnnnnnnnnnnnnnnnnnnnnnnnnnnnnnnnnnnnnnnnnnnnnnnnnnnnnnnnnnnnnnnnnnnnnnnnnnnnnnnnnnnnnnnnnnnnnnnnnnnnnnnnnnnnnnnnnnnnnnnnnnnnnnnnnnnnnnnnnnnnnnnnnnnnnnnnnnnnnnnnnnnnnnnnnnnnnnnnnnnnnnnnnnnnnnnnnnnnnnnnnnnnnnnnnnnnnnnnnnnnnnnnnnnnnnnnnnnnnnnnnnnnnnnnnnnnnnnnnnnnnnnnnnnnnnnnnnnnnnnnnnnnnnnnnnnnnnnnnnnnnnnnnnnnnnnnnnnnnnnnnnnnnnnnnnnnnnnnnnnnnnnnnnnnnnnnnnnnnnnnnnnnnnnnnnnnnnnnnnnnnnnnnnnnnnnnnnnnnnnnnnnnnnnnnnnnnnnnnnnnnnnnnnnnnnnnnnnnnnnnnnnnnnnnnnnnnnnnnnnnnnnnnnnnnnnnnnnnnnnnnnnnnnnnnnnnnnnnnnnnnnnnnnnnnnnnnnnnnnnnnnnnnnnnnnnnnnnnnnnnnnnnnnnnnnnnnnnnnnnnnnnnnnnnnnnnnnnnnnnnnnnnnnnnnnnnnnnnnnnnnnnnnnnnnnnnnnnnnnnnnnnnnnnnnnnnnnnnnnnnnnnnnnnnnnnnnnnnnnnnnnnnnnnnnnnnnnnnnnnnnnnnnnnnnnnnnnnnnnnnnnnnnnnnnnnnnnnnnnnnnnnnnnnnnnnnnnnnnnnnnnnnnnnnnnnnnnnnnnnnnnnnnnnnnnnnnnnnnnnnnnnnnnnnnnnnnnnnnnnnnnnnnnnnnnnnnnnnnnnnnnnnnnnnnnnnnnnnnnnnnnnnnnnnnnnnnnnnnnnnnnnnnnnnnnnnnnnnnnnnnnnnnnnnnnnnnnnnnnnnnnnnnnnnnnnnnnnnnnnnnnnnnnnnnnnnnnnnnnnnnnnnnnnnnnnnnnnnnnnnnnnnnnnnnnnnnnnnnnnnnnnnnnnnnnnnnnnnnnnnnnnnnnnnnnnnnnnnnnnnnnnnnnnnnnnnnnnnnnnnnnnnnnnnnnnnnnnnnnnnnnnnnnnnnnnnnnnnnnnnnnnnnnnnnnnnnnnnnnnnnnnnnnnnnnnnnnnnnnnnnnnnnnnnnnnnnnnnnnnnnnnnnnnnnnnnnnnnnnnnnnnnnnnnnnnnnnnnnnnnnnnnnnnnnnnnnnnnnnnnnnnnnnnnnnnnnnnnnnnnnnnnnnnnnnnnnnnnnnnnnnnnnnnnnnnnnnnnnnnnnnnnnnnnnnnnnnnnnnnnnnnnnnnnnnnnnnnnnnnnnnnnnnnnnnnnnnnnnnnnnnnnnnnnnnnnnnnnnnnnnnnnnnnnnnnnnnnnnnnnnnnnnnnnnnnnnnnnnnnnnnnnnnnnnnnnnnnnnnnnnnnnnnnnnnnnnnnnnnnnnnnnnnnnnnnnnnnnnnnnnnnnnnnnnnnnnnnnnnnnnnnnnnnnnnnnnnnnnnnnnnnnnnnnnnnnnnnnnnnnnnnnnnnnnnnnnnnnnnnnnnnnnnnnnnnnnnnnnnnnnnnnnnnnnnnnnnnnnnnnnnnnnnnnnnnnnnnnnnnnnnnnnnnnnnnnnnnnnnnnnnnnnnnnnnnnnnnnnnnnnnnnnnnnnnnnnnnnnnnnnnnnnnnnnnnnnnnnnnnnnnnnnnnnnnnnnnnnnnnnnnnnnnnnnnnnnnnnnnnnnnnnnnnnnnnnnnnnnnnnnnnnnnnnnnnnnnnnnnnnnnnnnnnnnnnnnnnnnnnnnnnnnnnnnnnnnnnnnnnnnnnnnnnnnnnnnnnnnnnnnnnnnnnnnnnnnnnnnnnnnnnnnnnnnnnnnnnnnnnnnnnnnnnnnnnnnnnnnnnnnnnnnnnnnnnnnnnnnnnnnnnnnnnnnnnnnnnnnnnnnnnnnnnnnnnnnnnnnnnnnnnnnnnnnnnnnnnnnnnnnnnnnnnnnnnnnnnnnnnnnnnnnnnnnnnnnnnnnnnnnnnnnnnnnnnnnnnnnnnnnnnnnnnnnnnnnnnnnnnnnnnnnnnnnnnnnnnnnnnnnnnnnnnnnnnnnnnnnnnnnnnnnnnnnnnnnnnnnnnnnnnnnnnnnnnnnnnnnnnnnnnnnnnnnnnnnnnnnnnnnnnnnnnnnnnnnnnnnnnnnnnnnnnnnnnnnnnnnnnnnnnnnnnnnnnnnnnnnnnnnnnnnnnnnnnnnnnnnnnnnnnnnnnnnnnnnnnnnnnnnnnnnnnnnnnnnnnnnnnnnnnnnnnnnnnnnnnnnnnnnnnnnnnnnnnnnnnnnnnnnnnnnnnnnnnnnnnnnnnnnnnnnnnnnnnnnnnnnnnnnnnnnnnnnnnnnnnnnnnnnnnnnnnnnnnnnnnnnnnnnnnnnnnnnnnnnnnnnnnnnnnnnnnnnnnnnnnnnnnnnnnnnnnnnnnnnnnnnnnnnnnnnnnnnnnnnnnnnnnnnnnnnnnnnnnnnnnnnnnnnnnnnnnnnnnnnnnnnnnnnnnnnnnnnnnnnnnnnnnnnnnnnnnnnnnnnnnnnnnnnnnnnnnnnnnnnnnnnnnnnnnnnnnnnnnnnnnnnnnnnnnnnnnnnnnnnnnnnnnnnnnnnnnnnnnnnnnnnnnnnnnnnnnnnnnnnnnnnnnnnnnnnnnnnnnnnnnnnnnnnnnnnnnnnnnnnnnnnnnnnnnnnnnnnnnnnnnnnnnnnnnnnnnnnnnnnnnnnnnnnnnnnnnnnnnnnnnnnnnnnnnnnnnnnnnnnnnnnnnnnnnnnnnnnnnnnnnnnnnnnnnnnnnnnnnnnnnnnnnnnnnnnnnnnnnnnnnnnnnnnnnnnnnnnnnnnnnnnnnnnnnnnnnnnnnnnnnnnnnnnnnnnnnnnnnnnnnnnnnnnnnnnnnnnnnnnnnnnnnnnnnnnnnnnnnnnnnnnnnnnnnnnnnnnnnnnnnnnnnnnnnnnnnnnnnnnnnnnnnnnnnnnnnnnnnnnnnnnnnnnnnnnnnnnnnnnnnnnnnnnnnnnnnnnnnnnnnnnnnnnnnnnnnnnnnnnnnnnnnnnnnnnnnnnnnnnnnnnnnnnnnnnnnnnnnnnnnnnnnnnnnnnnnnnnnnnnnnnnnnnnnnnnnnnnnnnnnnnnnnnnnnnnnnnnnnnnnnnnnnnnnnnnnnnnnnnnnnnnnnnnnnnnnnnnnnnnnnnnnnnnnnnnnnnnnnnnnnnnnnnnnnnnnnnnnnnnnnnnnnnnnnnnnnnnnnnnnnnnnnnnnnnnnnnnnnnnnnnnnnnnnnnnnnnnnnnnnnnnnnnnnnnnnnnnnnnnnnnnnnnnnnnnnnnnnnnnnnnnnnnnnnnnnnnnnnnnnnnnnnnnnnnnnnnnnnnnnnnnnnnnnnnnnnnnnnnnnnnnnnnnnnnnnnnnnnnnnnnnnnnnnnnnnnnnnnnnnnnnnnnnnnnnnnnnnnnnnnnnnnnnnnnnnnnnnnnnnnnnnnnnnnnnnnnnnnnnnnnnnnnnnnnnnnnnnnnnnnnnnnnnnnnnnnnnnnnnnnnnnnnnnnnnnnnnnnnnnnnnnnnnnnnnnnnnnnnnnnnnnnnnnnnnnnnnnnnnnnnnnnnnnnnnnnnnnnnnnnnnnnnnnnnnnnnnnnnnnnnnnnnnnnnnnnnnnnnnnnnnnnnnnnnnnnnnnnnnnnnnnnnnnnnnnnnnnnnnnnnnnnnnnnnnnnnnnnnnnnnnnnnnnnnnnnnnnnnnnnnnnnnnnnnnnnnnnnnnnnnnnnnnnnnnnnnnnnnnnnnnnnnnnnnnnnnnnnnnnnnnnnnnnnnnnnnnnnnnnnnnnnnnnnnnnnnnnnnnnnnnnnnnnnnnnnnnnnnnnnnnnnnnnnnnnnnnnnnnnnnnnnnnnnnnnnnnnnnnnnnnnnnnnnnnnnnnnnnnnnnnnnnnnnnnnnnnnnnnnnnnnnnnnnnnnnnnnnnnnnnnnnnnnnnnnnnnnnnnnnnnnnnnnnnnnnnnnnnnnnnnnnnnnnnnnnnnnnnnnnnnnnnnnnnnnnnnnnnnnnnnnnnnnnnnnnnnnnnnnnnnnnnnnnnnnnnnnnnnnnnnnnnnnnnnnnnnnnnnnnnnnnnnnnnnnnnnnnnnnnnnnnnnnnnnnnnnnnnnnnnnnnnnnnnnnnnnnnnnnnnnnnnnnnnnnnnnnnnnnnnnnnnnnnnnnnnnnnnnnnnnnnnnnnnnnnnnnnnnnnnnnnnnnnnnnnnnnnnnnnnnnnnnnnnnnnnnnnnnnnnnnnnnnnnnnnnnnnnnnnnnnnnnnnnnnnnnnnnnnnnnnnnnnnnnnnnnnnnnnnnnnnnnnnnnnnnnnnnnnnnnnnnnnnnnnnnnnnnnnnnnnnnnnnnnnnnnnnnnnnnnnnnnnnnnnnnnnnnnnnnnnnnnnnnnnnnnnnnnnnnnnnnnnnnnnnnnnnnnnnnnnnnnnnnnnnnnnnnnnnnnnnnnnnnnnnnnnnnnnnnnnnnnnnnnnnnnnnnnnnnnnnnnnnnnnnnnnnnnnnnnnnnnnnnnnnnnnnnnnnnnnnnnnnnnnnnnnnnnnnnnnnnnnnnnnnnnnnnnnnnnnnnnnnnnnnnnnnnnnnnnnnnnnnnnnnnnnnnnnnnnnnnnnnnnnnnnnnnnnnnnnnnnnnnnnnnnnnnnnnnnnnnnnnnnnnnnnnnnnnnnnnnnnnnnnnnnnnnnnnnnnnnnnnnnnnnnnnnnnnnnnnnnnnnnnnnnnnnnnnnnnnnnnnnnnnnnnnnnnnnnnnnnnnnnnnnnnnnnnnnnnnnnnnnnnnnnnnnnnnnnnnnnnnnnnnnnnnnnnnnnnnnnnnnnnnnnnnnnnnnnnnnnnnnnnnnnnnnnnnnnnnnnnnnnnnnnnnnnnnnnnnnnnnnnnnnnnnnnnnnnnnnnnnnnnnnnnnnnnnnnnnnnnnnnnnnnnnnnnnnnnnnnnnnnnnnnnnnnnnnnnnnnnnnnnnnnnnnnnnnnnnnnnnnnnnnnnnnnnnnnnnnnnnnnnnnnnnnnnnnnnnnnnnnnnnnnnnnnnnnnnnnnnnnnnnnnnnnnnnnnnnnnnnnnnnnnnnnnnnnnnnnnnnnnnnnnnnnnnnnnnnnnnnnnnnnnnnnnnnnnnnnnnnnnnnnnnnnnnnnnnnnnnnnnnnnnnnnnnnnnnnnnnnnnnnnnnnnnnnnnnnnnnnnnnnnnnnnnnnnnnnnnnnnnnnnnnnnnnnnnnnnnnnnnnnnnnnnnnnnnnnnnnnnnnnnnnnnnnnnnnnnnnnnnnnnnnnnnnnnnnnnnnnnnnnnnnnnnnnnnnnnnnnnnnnnnnnnnnnnnnnnnnnnnnnnnnnnnnnnnnnnnnnnnnnnnnnnnnnnnnnnnnnnnnnnnnnnnnnnnnnnnnnnnnnnnnnnnnnnnnnnnnnnnnnnnnnnnnnnnnnnnnnnnnnnnnnnnnnnnnnnnnnnnnnnnnnnnnnnnnnnnnnnnnnnnnnnnnnnnnnnnnnnnnnnnnnnnnnnnnnnnnnnnnnnnnnnnnnnnnnnnnnnnnnnnnnnnnnnnnnnnnnnnnnnnnnnnnnnnnnnnnnnnnnnnnnnnnnnnnnnnnnnnnnnnnnnnnnnnnnnnnnnnnnnnnnnnnnnnnnnnnnnnnnnnnnnnnnnnnnnnnnnnnnnnnnnnnnnnnnnnnnnnnnnnnnnnnnnnnnnnnnnnnnnnnnnnnnnnnnnnnnnnnnnnnnnnnnnnnnnnnnnnnnnnnnnnnnnnnnnnnnnnnnnnnnnnnnnnnnnnnnnnnnnnnnnnnnnnnnnnnnnnnnnnnnnnnnnnnnnnnnnnnnnnnnnnnnnnnnnnnnnnnnnnnnnnnnnnnnnnnnnnnnnnnnnnnnnnnnnnnnnnnnnnnnnnnnnnnnnnnnnnnnnnnnnnnnnnnnnnnnnnnnnnnnnnnnnnnnnnnnnnnnnnnnnnnnnnnnnnnnnnnnnnnnnnnnnnnnnnnnnnnnnnnnnnnnnnnnnnnnnnnnnnnnnnnnnnnnnnnnnnnnnnnnnnnnnnnnnnnnnnnnnnnnnnnnnnnnnnnnnnnnnnnnnnnnnnnnnnnnnnnnnnnnnnnnnnnnnnnnnnnnnnnnnnnnnnnnnnnnnnnnnnnnnnnnnnnnnnnnnnnnnnnnnnnnnnnnnnnnnnnnnnnnnnnnnnnnnnnnnnnnnnnnnnnnnnnnnnnnnnnnnnnnnnnnnnnnnnnnnnnnnnnnnnnnnnnnnnnnnnnnnnnnnnnnnnnnnnnnnnnnnnnnnnnnnnnnnnnnnnnnnnnnnnnnnnnnnnnnnnnnnnnnnnnnnnnnnnnnnnnnnnnnnnnnnnnnnnnnnnnnnnnnnnnnnnnnnnnnnnnnnnnnnnnnnnnnnnnnnnnnnnnnnnnnnnnnnnnnnnnnnnnnnnnnnnnnnnnnnnnnnnnnnnnnnnnnnnnnnnnnnnnnnnnnnnnnnnnnnnnnnnnnnnnnnnnnnnnnnnnnnnnnnnnnnnnnnnnnnnnnnnnnnnnnnnnnnnnnnnnnnnnnnnnnnnnnnnnnnnnnnnnnnnnnnnnnnnnnnnnnnnnnnnnnnnnnnnnnnnnnnnnnnnnnnnnnnnnnnnnnnnnnnnnnnnnnnnnnnnnnnnnnnnnnnnnnnnnnnnnnnnnnnnnnnnnnnnnnnnnnnnnnnnnnnnnnnnnnnnnnnnnnnnnnnnnnnnnnnnnnnnnnnnnnnnnnnnnnnnnnnnnnnnnnnnnnnnnnnnnnnnnnnnnnnnnnnnnnnnnnnnnnnnnnnnnnnnnnnnnnnnnnnnnnnnnnnnnnnnnnnnnnnnnnnnnnnnnnnnnnnnnnnnnnnnnnnnnnnnnnnnnnnnnnnnnnnnnnnnnnnnnnnnnnnnnnnnnnnnnnnnnnnnnnnnnnnnnnnnnnnnnnnnnnnnnnnnnnnnnnnnnnnnnnnnnnnnnnnnnnnnnnnnnnnnnnnnnnnnnnnnnnnnnnnnnnnnnnnnnnnnnnnnnnnnnnnnnnnnnnnnnnnnnnnnnnnnnnnnnnnnnnnnnnnnnnnnnnnnnnnnnnnnnnnnnnnnnnnnnnnnnnnnnnnnnnnnnnnnnnnnnnnnnnnnnnnnnnnnnnnnnnnnnnnnnnnnnnnnnnnnnnnnnnnnnnnnnnnnnnnnnnnnnnnnnnnnnnnnnnnnnnnnnnnnnnnnnnnnnnnnnnnnnnnnnnnnnnnnnnnnnnnnnnnnnnnnnnnnnnnnnnnnnnnnnnnnnnnnnnnnnnnnnnnnnnnnnnnnnnnnnnnnnnnnnnnnnnnnnnnnnnnnnnnnnnnnnnnnnnnnnnnnnnnnnnnnnnnnnnnnnnnnnnnnnnnnnnnnnnnnnnnnnnnnnnnnnnnnnnnnnnnnnnnnnnnnnnnnnnnnnnnnnnnnnnnnnnnnnnnnnnnnnnnnnnnnnnnnnnnnnnnnnnnnnnnnnnnnnnnnnnnnnnnnnnnnnnnnnnnnnnnnnnnnnnnnnnnnnnnnnnnnnnnnnnnnnnnnnnnnnnnnnnnnnnnnnnnnnnnnnnnnnnnnnnnnnnnnnnnnnnnnnnnnnnnnnnnnnnnnnnnnnnnnnnnnnnnnnnnnnnnnnnnnnnnnnnnnnnnnnnnnnnnnnnnnnnnnnnnnnnnnnnnnnnnnnnnnnnnnnnnnnnnnnnnnnnnnnnnnnnnnnnnnnnnnnnnnnnnnnnnnnnnnnnnnnnnnnnnnnnnnnnnnnnnnnnnnnnnnnnnnnnnnnnnnnnnnnnnnnnnnnnnnnnnnnnnnnnnnnnnnnnnnnnnnnnnnnnnnnnnnnnnnnnnnnnnnnnnnnnnnnnnnnnnnnnnnnnnnnnnnnnnnnnnnnnnnnnnnnnnnnnnnnnnnnnnnnnnnnnnnnnnnnnnnnnnnnnnnnnnnnnnnnnnnnnnnnnnnnnnnnnnnnnnnnnnnnnnnnnnnnnnnnnnnnnnnnnnnnnnnnnnnnnnnnnnnnnnnnnnnnnnnnnnnnnnnnnnnnnnnnnnnnnnnnnnnnnnnnnnnnnnnnnnnnnnnnnnnnnnnnnnnnnnnnnnnnnnnnnnnnnnnnnnnnnnnnnnnnnnnnnnnnnnnnnnnnnnnnnnnnnnnnnnnnnnnnnnnnnnnnnnnnnnnnnnnnnnnnnnnnnnnnnnnnnnnnnnnnnnnnnnnnnnnnnnnnnnnnnnnnnnnnnnnnnnnnnnnnnnnnnnnnnnnnnnnnnnnnnnnnnnnnnnnnnnnnnnnnnnnnnnnnnnnnnnnnnnnnnnnnnnnnnnnnnnnnnnnnnnnnnnnnnnnnnnnnnnnnnnnnnnnnnnnnnnnnnnnnnnnnnnnnnnnnnnnnnnnnnnnnnnnnnnnnnnnnnnnnnnnnnnnnnnnnnnnnnnnnnnnnnnnnnnnnnnnnnnnnnnnnnnnnnnnnnnnnnnnnnnnnnnnnnnnnnnnnnnnnnnnnnnnnnnnnnnnnnnnnnnnnnnnnnnnnnnnnnnnnnnnnnnnnnnnnnnnnnnnnnnnnnnnnnnnnnnnnnnnnnnnnnnnnnnnnnnnnnnnnnnnnnnnnnnnnnnnnnnnnnnnnnnnnnnnnnnnnnnnnnnnnnnnnnnnnnnnnnnnnnnnnnnnnnnnnnnnnnnnnnnnnnnnnnnnnnnnnnnnnnnnnnnnnnnnnnnnnnnnnnnnnnnnnnnnnnnnnnnnnnnnnnnnnnnnnnnnnnnnnnnnnnnnnnnnnnnnnnnnnnnnnnnnnnnnnnnnnnnnnnnnnnnnnnnnnnnnnnnnnnnnnnnnnnnnnnnnnnnnnnnnnnnnnnnnnnnnnnnnnnnnnnnnnnnnnnnnnnnnnnnnnnnnnnnnnnnnnnnnnnnnnnnnnnnnnnnnnnnnnnnnnnnnnnnnnnnnnnnnnnnnnnnnnnnnnnnnnnnnnnnnnnnnnnnnnnnnnnnnnnnnnnnnnnnnnnnnnnnnnnnnnnnnnnnnnnnnnnnnnnnnnnnnnnnnnnnnnnnnnnnnnnnnnnnnnnnnnnnnnnnnnnnnnnnnnnnnnnnnnnnnnnnnnnnnnnnnnnnnnnnnnnnnnnnnnnnnnnnnnnnnnnnnnnnnnnnnnnnnnnnnnnnnnnnnnnnnnnnnnnnnnnnnnnnnnnnnnnnnnnnnnnnnnnnnnnnnnnnnnnnnnnnnnnnnnnnnnnnnnnnnnnnnnnnnnnnnnnnnnnnnnnnnnnnnnnnnnnnnnnnnnnnnnnnnnnnnnnnnnnnnnnnnnnnnnnnnnnnnnnnnnnnnnnnnnnnnnnnnnnnnnnnnnnnnnnnnnnnnnnnnnnnnnnnnnnnnnnnnnnnnnnnnnnnnnnnnnnnnnnnnnnnnnnnnnnnnnnnnnnnnnnnnnnnnnnnnnnnnnnnnnnnnnnnnnnnnnnnnnnnnnnnnnnnnnnnnnnnnnnnnnnnnnnnnnnnnnnnnnnnnnnnnnnnnnnnnnnnnnnnnnnnnnnnnnnnnnnnnnnnnnnnnnnnnnnnnnnnnnnnnnnnnnnnnnnnnnnnnnnnnnnnnnnnnnnnnnnnnnnnnnnnnnnnnnnnnnnnnnnnnnnnnnnnnnnnnnnnnnnnnnnnnnnnnnnnnnnnnnnnnnnnnnnnnnnnnnnnnnnnnnnnnnnnnnnnnnnnnnnnnnnnnnnnnnnnnnnnnnnnnnnnnnnnnnnnnnnnnnnnnnnnnnnnnnnnnnnnnnnnnnnnnnnnnnnnnnnnnnnnnnnnnnnnnnnnnnnnnnnnnnnnnnnnnnnnnnnnnnnnnnnnnnnnnnnnnnnnnnnnnnnnnnnnnnnnnnnnnnnnnnnnnnnnnnnnnnnnnnnnnnnnnnnnnnnnnnnnnnnnnnnnnnnnnnnnnnnnnnnnnnnnnnnnnnnnnnnnnnnnnnnnnnnnnnnnnnnnnnnnnnnnnnnnnnnnnnnnnnnnnnnnnnnnnnnnnnnnnnnnnnnnnnnnnnnnnnnnnnnnnnnnnnnnnnnnnnnnnnnnnnnnnnnnnnnnnnnnnnnnnnnnnnnnnnnnnnnnnnnnnnnnnnnnnnnnnnnnnnnnnnnnnnnnnnnnnnnnnnnnnnnnnnnnnnnnnnnnnnnnnnnnnnnnnnnnnnnnnnnnnnnnnnnnnnnnnnnnnnnnnnnnnnnnnnnnnnnnnnnnnnnnnnnnnnnnnnnnnnnnnnnnnnnnnnnnnnnnnnnnnnnnnnnnnnnnnnnnnnnnnnnnnnnnnnnnnnnnnnnnnnnnnnnnnnnnnnnnnnnnnnnnnnnnnnnnnnnnnnnnnnnnnnnnnnnnnnnnnnnnnnnnnnnnnnnnnnnnnnnnnnnnnnnnnnnnnnnnnnnnnnnnnnnnnnnnnnnnnnnnnnnnnnnnnnnnnnnnnnnnnnnnnnnnnnnnnnnnnnnnnnnnnnnnnnnnnnnnnnnnnnnnnnnnnnnnnnnnnnnnnnnnnnnnnnnnnnnnnnnnnnnnnnnnnnnnnnnnnnnnnnnnnnnnnnnnnnnnnnnnnnnnnnnnnnnnnnnnnnnnnnnnnnnnnnnnnnnnnnnnnnnnnnnnnnnnnnnnnnnnnnnnnnnnnnnnnnnnnnnnnnnnnnnnnnnnnnnnnnnnnnnnnnnnnnnnnnnnnnnnnnnnnnnnnnnnnnnnnnnnnnnnnnnnnnnnnnnnnnnnnnnnnnnnnnnnnnnnnnnnnnnnnnnnnnnnnnnnnnnnnnnnnnnnnnnnnnnnnnnnnnnnnnnnnnnnnnnnnnnnnnnnnnnnnnnnnnnnnnnnnnnnnnnnnnnnnnnnnnnnnnnnnnnnnnnnnnnnnnnnnnnnnnnnnnnnnnnnnnnnnnnnnnnnnnnnnnnnnnnnnnnnnnnnnnnnnnnnnnnnnnnnnnnnnnnnnnnnnnnnnnnnnnnnnnnnnnnnnnnnnnnnnnnnnnnnnnnnnnnnnnnnnnnnnnnnnnnnnnnnnnnnnnnnnnnnnnnnnnnnnnnnnnnnnnnnnnnnnnnnnnnnnnnnnnnnnnnnnnnnnnnnnnnnnnnnnnnnnnnnnnnnnnnnnnnnnnnnnnnnnnnnnnnnnnnnnnnnnnnnnnnnnnnnnnnnnnnnnnnnnnnnnnnnnnnnnnnnnnnnnnnnnnnnnnnnnnnnnnnnnnnnnnnnnnnnnnnnnnnnnnnnnnnnnnnnnnnnnnnnnnnnnnnnnnnnnnnnnnnnnnnnnnnnnnnnnnnnnnnnnnnnnnnnnnnnnnnnnnnnnnnnnnnnnnnnnnnnnnnnnnnnnnnnnnnnnnnnnnnnnnnnnnnnnnnnnnnnnnnnnnnnnnnnnnnnnnnnnnnnnnnnnnnnnnnnnnnnnnnnnnnnnnnnnnnnnnnnnnnnnnnnnnnnnnnnnnnnnnnnnnnnnnnnnnnnnnnnnnnnnnnnnnnnnnnnnnnnnnnnnnnnnnnnnnnnnnnnnnnnnnnnnnnnnnnnnnnnnnnnnnnnnnnnnnnnnnnnnnnnnnnnnnnnnnnnnnnnnnnnnnnnnnnnnnnnnnnnnnnnnnnnnnnnnnnnnnnnnnnnnnnnnnnnnnnnnnnnnnnnnnnnnnnnnnnnnnnnnnnnnnnnnnnnnnnnnnnnnnnnnnnnnnnnnnnnnnnnnnnnnnnnnnnnnnnnnnnnnnnnnnnnnnnnnnnnnnnnnnnnnnnnnnnnnnnnnnnnnnnnnnnnnnnnnnnnnnnnnnnnnnnnnnnnnnnnnnnnnnnnnnnnnnnnnnnnnnnnnnnnnnnnnnnnnnnnnnnnnnnnnnnnnnnnnnnnnnnnnnnnnnnnnnnnnnnnnnnnnnnnnnnnnnnnnnnnnnnnnnnnnnnnnnnnnnnnnnnnnnnnnnnnnnnnnnnnnnnnnnnnnnnnnnnnnnnnnnnnnnnnnnnnnnnnnnnnnnnnnnnnnnnnnnnnnnnnnnnnnnnnnnnnnnnnnnnnnnnnnnnnnnnnnnnnnnnnnnnnnnnnnnnnnnnnnnnnnnnnnnnnnnnnnnnnnnnnnnnnnnnnnnnnnnnnnnnnnnnnnnnnnnnnnnnnnnnnnnnnnnnnnnnnnnnnnnnnnnnnnnnnnnnnnnnnnnnnnnnnnnnnnnnnnnnnnnnnnnnnnnnnnnnnnnnnnnnnnnnnnnnnnnnnnnnnnnnnnnnnnnnnnnnnnnnnnnnnnnnnnnnnnnnnnnnnnnnnnnnnnnnnnnnnnnnnnnnnnnnnnnnnnnnnnnnnnnnnnnnnnnnnnnnnnnnnnnnnnnnnnnnnnnnnnnnnnnnnnnnnnnnnnnnnnnnnnnnnnnnnnnnnnnnnnnnnnnnnnnnnnnnnnnnnnnnnnnnnnnnnnnnnnnnnnnnnnnnnnnnnnnnnnnnnnnnnnnnnnnnnnnnnnnnnnnnnnnnnnnnnnnnnnnnnnnnnnnnnnnnnnnnnnnnnnnnnnnnnnnnnnnnnnnnnnnnnnnnnnnnnnnnnnnnnnnnnnnnnnnnnnnnnnnnnnnnnnnnnnnnnnnnnnnnnnnnnnnnnnnnnnnnnnnnnnnnnnnnnnnnnnnnnnnnnnnnnnnnnnnnnnnnnnnnnnnnnnnnnnnnnnnnnnnnnnnnnnnnnnnnnnnnnnnnnnnnnnnnnnnnnnnnnnnnnnnnnnnnnnnnnnnnnnnnnnnnnnnnnnnnnnnnnnnnnnnnnnnnnnnnnnnnnnnnnnnnnnnnnnnnnnnnnnnnnnnnnnnnnnnnnnnnnnnnnnnnnnnnnnnnnnnnnnnnnnnnnnnnnnnnnnnnnnnnnnnnnnnnnnnnnnnnnnnnnnnnnnnnnnnnnnnnnnnnnnnnnnnnnnnnnnnnnnnnnnnnnnnnnnnnnnnnnnnnnnnnnnnnnnnnnnnnnnnnnnnnnnnnnnnnnnnnnnnnnnnnnnnnnnnnnnnnnnnnnnnnnnnnnnnnnnnnnnnnnnnnnnnnnnnnnnnnnnnnnnnnnnnnnnnnnnnnnnnnnnnnnnnnnnnnnnnnnnnnnnnnnnnnnnnnnnnnnnnnnnnnnnnnnnnnnnnnnnnnnnnnnnnnnnnnnnnnnnnnnnnnnnnnnnnnnnnnnnnnnnnnnnnnnnnnnnnnnnnnnnnnnnnnnnnnnnnnnnnnnnnnnnnnnnnnnnnnnnnnnnnnnnnnnnnnnnnnnnnnnnnnnnnnnnnnnnnnnnnnnnnnnnnnnnnnnnnnnnnnnnnnnnnnnnnnnnnnnnnnnnnnnnnnnnnnnnnnnnnnnnnnnnnnnnnnnnnnnnnnnnnnnnnnnnnnnnnnnnnnnnnnnnnnnnnnnnnnnnnnnnnnnnnnnnnnnnnnnnnnnnnnnnnnnnnnnnnnnnnnnnnnnnnnnnnnnnnnnnnnnnnnnnnnnnnnnnnnnnnnnnnnnnnnnnnnnnnnnnnnnnnnnnnnnnnnnnnnnnnnnnnnnnnnnnnnnnnnnnnnnnnnnnnnnnnnnnnnnnnnnnnnnnnnnnnnnnnnnnnnnnnnnnnnnnnnnnnnnnnnnnnnnnnnnnnnnnnnnnnnnnnnnnnnnnnnnnnnnnnnnnnnnnnnnnnnnnnnnnnnnnnnnnnnnnnnnnnnnnnnnnnnnnnnnnnnnnnnnnnnnnnnnnnnnnnnnnnnnnnnnnnnnnnnnnnnnnnnnnnnnnnnnnnnnnnnnnnnnnnnnnnnnnnnnnnnnnnnnnnnnnnnnnnnnnnnnnnnnnnnnnnnnnnnnnnnnnnnnnnnnnnnnnnnnnnnnnnnnnnnnnnnnnnnnnnnnnnnnnnnnnnnnnnnnnnnnnnnnnnnnnnnnnnnnnnnnnnnnnnnnnnnnnnnnnnnnnnnnnnnnnnnnnnnnnnnnnnnnnnnnnnnnnnnnnnnnnnnnnnnnnnnnnnnnnnnnnnnnnnnnnnnnnnnnnnnnnnnnnnnnnnnnnnnnnnnnnnnnnnnnnnnnnnnnnnnnnnnnnnnnnnnnnnnnnnnnnnnnnnnnnnnnnnnnnnnnnnnnnnnnnnnnnnnnnnnnnnnnnnnnnnnnnnnnnnnnnnnnnnnnnnnnnnnnnnnnnnnnnnnnnnnnnnnnnnnnnnnnnnnnnnnnnnnnnnnnnnnnnnnnnnnnnnnnnnnnnnnnnnnnnnnnnnnnnnnnnnnnnnnnnnnnnnnnnnnnnnnnnnnnnnnnnnnnnnnnnnnnnnnnnnnnnnnnnnnnnnnnnnnnnnnnnnnnnnnnnnnnnnnnnnnnnnnnnnnnnnnnnnnnnnnnnnnnnnnnnnnnnnnnnnnnnnnnnnnnnnnnnnnnnnnnnnnnnnnnnnnnnnnnnnnnnnnnnnnnnnnnnnnnnnnnnnnnnnnnnnnnnnnnnnnnnnnnnnnnnnnnnnnnnnnnnnnnnnnnnnnnnnnnnnnnnnnnnnnnnnnnnnnnnnnnnnnnnnnnnnnnnnnnnnnnnnnnnnnnnnnnnnnnnnnnnnnnnnnnnnnnnnnnnnnnnnnnnnnnnnnnnnnnnnnnnnnnnnnnnnnnnnnnnnnnnnnnnnnnnnnnnnnnnnnnnnnnnnnnnnnnnnnnnnnnnnnnnnnnnnnnnnnnnnnnnnnnnnnnnnnnnnnnnnnnnnnnnnnnnnnnnnnnnnnnnnnnnnnnnnnnnnnnnnnnnnnnnnnnnnnnnnnnnnnnnnnnnnnnnnnnnnnnnnnnnnnnnnnnnnnnnnnnnnnnnnnnnnnnnnnnnnnnnnnnnnnnnnnnnnnnnnnnnnnnnnnnnnnnnnnnnnnnnnnnnnnnnnnnnnnnnnnnnnnnnnnnnnnnnnnnnnnnnnnnnnnnnnnnnnnnnnnnnnnnnnnnnnnnnnnnnnnnnnnnnnnnnnnnnnnnnnnnnnnnnnnnnnnnnnnnnnnnnnnnnnnnnnnnnnnnnnnnnnnnnnnnnnnnnnnnnnnnnnnnnnnnnnnnnnnnnnnnnnnnnnnnnnnnnnnnnnnnnnnnnnnnnnnnnnnnnnnnnnnnnnnnnnnnnnnnnnnnnnnnnnnnnnnnnnnnnnnnnnnnnnnnnnnnnnnnnnnnnnnnnnnnnnnnnnnnnnnnnnnnnnnnnnnnnnnnnnnnnnnnnnnnnnnnnnnnnnnnnnnnnnnnnnnnnnnnnnnnnnnnnnnnnnnnnnnnnnnnnnnnnnnnnnnnnnnnnnnnnnnnnnnnnnnnnnnnnnnnnnnnnnnnnnnnnnnnnnnnnnnnnnnnnnnnnnnnnnnnnnnnnnnnnnnnnnnnnnnnnnnnnnnnnnnnnnnnnnnnnnnnnnnnnnnnnnnnnnnnnnnnnnnnnnnnnnnnnnnnnnnnnnnnnnnnnnnnnnnnnnnnnnnnnnnnnnnnnnnnnnnnnnnnnnnnnnnnnnnnnnnnnnnnnnnnnnnnnnnnnnnnnnnnnnnnnnnnnnnnnnnnnnnnnnnnnnnnnnnnnnnnnnnnnnnnnnnnnnnnnnnnnnnnnnnnnnnnnnnnnnnnnnnnnnnnnnnnnnnnnnnnnnnnnnnnnnnnnnnnnnnnnnnnnnnnnnnnnnnnnnnnnnnnnnnnnnnnnnnnnnnnnnnnnnnnnnnnnnnnnnnnnnnnnnnnnnnnnnnnnnnnnnnnnnnnnnnnnnnnnnnnnnnnnnnnnnnnnnnnnnnnnnnnnnnnnnnnnnnnnnnnnnnnnnnnnnnnnnnnnnnnnnnnnnnnnnnnnnnnnnnnnnnnnnnnnnnnnnnnnnnnnnnnnnnnnnnnnnnnnnnnnnnnnnnnnnnnnnnnnnnnnnnnnnnnnnnnnnnnnnnnnnnnnnnnnnnnnnnnnnnnnnnnnnnnnnnnnnnnnnnnnnnnnnnnnnnnnnnnnnnnnnnnnnnnnnnnnnnnnnnnnnnnnnnnnnnnnnnnnnnnnnnnnnnnnnnnnnnnnnnnnnnnnnnnnnnnnnnnnnnnnnnnnnnnnnnnnnnnnnnnnnnnnnnnnnnnnnnnnnnnnnnnnnnnnnnnnnnnnnnnnnnnnnnnnnnnnnnnnnnnnnnnnnnnnnnnnnnnnnnnnnnnnnnnnnnnnnnnnnnnnnnnnnnnnnnnnnnnnnnnnnnnnnnnnnnnnnnnnnnnnnnnnnnnnnnnnnnnnnnnnnnnnnnnnnnnnnnnnnnnnnnnnnnnnnnnnnnnnnnnnnnnnnnnnnnnnnnnnnnnnnnnnnnnnnnnnnnnnnnnnnnnnnnnnnnnnnnnnnnnnnnnnnnnnnnnnnnnnnnnnnnnnnnnnnnnnnnnnnnnnnnnnnnnnnnnnnnnnnnnnnnnnnnnnnnnnnnnnnnnnnnnnnnnnnnnnnnnnnnnnnnnnnnnnnnnnnnnnnnnnnnnnnnnnnnnnnnnnnnnnnnnnnnnnnnnnnnnnnnnnnnnnnnnnnnnnnnnnnnnnnnnnnnnnnnnnnnnnnnnnnnnnnnnnnnnnnnnnnnnnnnnnnnnnnnnnnnnnnnnnnnnnnnnnnnnnnnnnnnnnnnnnnnnnnnnnnnnnnnnnnnnnnnnnnnnnnnnnnnnnnnnnnnnnnnnnnnnnnnnnnnnnnnnnnnnnnnnnnnnnnnnnnnnnnnnnnnnnnnnnnnnnnnnnnnnnnnnnnnnnnnnnnnnnnnnnnnnnnnnnnnnnnnnnnnnnnnnnnnnnnnnnnnnnnnnnnnnnnnnnnnnnnnnnnnnnnnnnnnnnnnnnnnnnnnnnnnnnnnnnnnnnnnnnnnnnnnnnnnnnnnnnnnnnnnnnnnnnnnnnnnnnnnnnnnnnnnnnnnnnnnnnnnnnnnnnnnnnnnnnnnnnnnnnnnnnnnnnnnnnnnnnnnnnnnnnnnnnnnnnnnnnnnnnnnnnnnnnnnnnnnnnnnnnnnnnnnnnnnnnnnnnnnnnnnnnnnnnnnnnnnnnnnnnnnnnnnnnnnnnnnnnnnnnnnnnnnnnnnnnnnnnnnnnnnnnnnnnnnnnnnnnnnnnnnnnnnnnnnnnnnnnnnnnnnnnnnnnnnnnnnnnnnnnnnnnnnnnnnnnnnnnnnnnnnnnnnnnnnnnnnnnnnnnnnnnnnnnnnnnnnnnnnnnnnnnnnnnnnnnnnnnnnnnnnnnnnnnnnnnnnnnnnnnnnnnnnnnnnnnnnnnnnnnnnnnnnnnnnnnnnnnnnnnnnnnnnnnnnnnnnnnnnnnnnnnnnnnnnnnnnnnnnnnnnnnnnnnnnnnnnnnnnnnnnnnnnnnnnnnnnnnnnnnnnnnnnnnnnnnnnnnnnnnnnnnnnnnnnnnnnnnnnnnnnnnnnnnnnnnnnnnnnnnnnnnnnnnnnnnnnnnnnnnnnnnnnnnnnnnnnnnnnnnnnnnnnnnnnnnnnnnnnnnnnnnnnnnnnnnnnnnnnnnnnnnnnnnnnnnnnnnnnnnnnnnnnnnnnnnnnnnnnnnnnnnnnnnnnnnnnnnnnnnnnnnnnnnnnnnnnnnnnnnnnnnnnnnnnnnnnnnnnnnnnnnnnnnnnnnnnnnnnnnnnnnnnnnnnnnnnnnnnnnnnnnnnnnnnnnnnnnnnnnnnnnnnnnnnnnnnnnnnnnnnnnnnnnnnnnnnnnnnnnnnnnnnnnnnnnnnnnnnnnnnnnnnnnnnnnnnnnnnnnnnnnnnnnnnnnnnnnnnnnnnnnnnnnnnnnnnnnnnnnnnnnnnnnnnnnnnnnnnnnnnnnnnnnnnnnnnnnnnnnnnnnnnnnnnnnnnnnnnnnnnnnnnnnnnnnnnnnnnnnnnnnnnnnnnnnnnnnnnnnnnnnnnnnnnnnnnnnnnnnnnnnnnnnnnnnnnnnnnnnnnnnnnnnnnnnnnnnnnnnnnnnnnnnnnnnnnnnnnnnnnnnnnnnnnnnnnnnnnnnnnnnnnnnnnnnnnnnnnnnnnnnnnnnnnnnnnnnnnnnnnnnnnnnnnnnnnnnnnnnnnnnnnnnnnnnnnnnnnnnnnnnnnnnnnnnnnnnnnnnnnnnnnnnnnnnnnnnnnnnnnnnnnnnnnnnnnnnnnnnnnnnnnnnnnnnnnnnnnnnnnnnnnnnnnnnnnnnnnnnnnnnnnnnnnnnnnnnnnnnnnnnnnnnnnnnnnnnnnnnnnnnnnnnnnnnnnnnnnnnnnnnnnnnnnnnnnnnnnnnnnnnnnnnnnnnnnnnnnnnnnnnnnnnnnnnnnnnnnnnnnnnnnnnnnnnnnnnnnnnnnnnnnnnnnnnnnnnnnnnnnnnnnnnnnnnnnnnnnnnnnnnnnnnnnnnnnnnnnnnnnnnnnnnnnnnnnnnnnnnnnnnnnnnnnnnnnnnnnnnnnnnnnnnnnnnnnnnnnnnnnnnnnnnnnnnnnnnnnnnnnnnnnnnnnnnnnnnnnnnnnnnnnnnnnnnnnnnnnnnnnnnnnnnnnnnnnnnnnnnnnnnnnnnnnnnnnnnnnnnnnnnnnnnnnnnnnnnnnnnnnnnnnnnnnnnnnnnnnnnnnnnnnnnnnnnnnnnnnnnnnnnnnnnnnnnnnnnnnnnnnnnnnnnnnnnnnnnnnnnnnnnnnnnnnnnnnnnnnnnnnnnnnnnnnnnnnnnnnnnnnnnnnnnnnnnnnnnnnnnnnnnnnnnnnnnnnnnnnnnnnnnnnnnnnnnnnnnnnnnnnnnnnnnnnnnnnnnnnnnnnnnnnnnnnnnnnnnnnnnnnnnnnnnnnnnnnnnnnnnnnnnnnnnnnnnnnnnnnnnnnnnnnnnnnnnnnnnnnnnnnnnnnnnnnnnnnnnnnnnnnnnnnnnnnnnnnnnnnnnnnnnnnnnnnnnnnnnnnnnnnnnnnnnnnnnnnnnnnnnnnnnnnnnnnnnnnnnnnnnnnnnnnnnnnnnnnnnnnnnnnnnnnnnnnnnnnnnnnnnnnnnnnnnnnnnnnnnnnnnnnnnnnnnnnnnnnnnnnnnnnnnnnnnnnnnnnnnnnnnnnnnnnnnnnnnnnnnnnnnnnnnnnnnnnnnnnnnnnnnnnnnnnnnnnnnnnnnnnnnnnnnnnnnnnnnnnnnnnnnnnnnnnnnnnnnnnnnnnnnnnnnnnnnnnnnnnnnnnnnnnnnnnnnnnnnnnnnnnnnnnnnnnnnnnnnnnnnnnnnnnnnnnnnnnnnnnnnnnnnnnnnnnnnnnnnnnnnnnnnnnnnnnnnnnnnnnnnnnnnnnnnnnnnnnnnnnnnnnnnnnnnnnnnnnnnnnnnnnnnnnnnnnnnnnnnnnnnnnnnnnnnnnnnnnnnnnnnnnnnnnnnnnnnnnnnnnnnnnnnnnnnnnnnnnnnnnnnnnnnnnnnnnnnnnnnnnnnnnnnnnnnnnnnnnnnnnnnnnnnnnnnnnnnnnnnnnnnnnnnnnnnnnnnnnnnnnnnnnnnnnnnnnnnnnnnnnnnnnnnnnnnnnnnnnnnnnnnnnnnnnnnnnnnnnnnnnnnnnnnnnnnnnnnnnnnnnnnnnnnnnnnnnnnnnnnnnnnnnnnnnnnnnnnnnnnnnnnnnnnnnnnnnnnnnnnnnnnnnnnnnnnnnnnnnnnnnnnnnnnnnnnnnnnnnnnnnnnnnnnnnnnnnnnnnnnnnnnnnnnnnnnnnnnnnnnnnnnnnnnnnnnnnnnnnnnnnnnnnnnnnnnnnnnnnnnnnnnnnnnnnnnnnnnnnnnnnnnnnnnnnnnnnnnnnnnnnnnnnnnnnnnnnnnnnnnnnnnnnnnnnnnnnnnnnnnnnnnnnnnnnnnnnnnnnnnnnnnnnnnnnnnnnnnnnnnnnnnnnnnnnnnnnnnnnnnnnnnnnnnnnnnnnnnnnnnnnnnnnnnnnnnnnnnnnnnnnnnnnnnnnnnnnnnnnnnnnnnnnnnnnnnnnnnnnnnnnnnnnnnnnnnnnnnnnnnnnnnnnnnnnnnnnnnnnnnnnnnnnnnnnnnnnnnnnnnnnnnnnnnnnnnnnnnnnnnnnnnnnnnnnnnnnnnnnnnnnnnnnnnnnnnnnnnnnnnnnnnnnnnnnnnnnnnnnnnnnnnnnnnnnnnnnnnnnnnnnnnnnnnnnnnnnnnnnnnnnnnnnnnnnnnnnnnnnnnnnnnnnnnnnnnnnnnnnnnnnnnnnnnnnnnnnnnnnnnnnnnnnnnnnnnnnnnnnnnnnnnnnnnnnnnnnnnnnnnnnnnnnnnnnnnnnnnnnnnnnnnnnnnnnnnnnnnnnnnnnnnnnnnnnnnnnnnnnnnnnnnnnnnnnnnnnnnnnnnnnnnnnnnnnnnnnnnnnnnnnnnnnnnnnnnnnnnnnnnnnnnnnnnnnnnnnnnnnnnnnnnnnnnnnnnnnnnnnnnnnnnnnnnnnnnnnnnnnnnnnnnnnnnnnnnnnnnnnnnnnnnnnnnnnnnnnnnnnnnnnnnnnnnnnnnnnnnnnnnnnnnnnnnnnnnnnnnnnnnnnnnnnnnnnnnnnnnnnnnnnnnnnnnnnnnnnnnnnnnnnnnnnnnnnnnnnnnnnnnnnnnnnnnnnnnnnnnnnnnnnnnnnnnnnnnnnnnnnnnnnnnnnnnnnnnnnnnnnnnnnnnnnnnnnnnnnnnnnnnnnnnnnnnnnnnnnnnnnnnnnnnnnnnnnnnnnnnnnnnnnnnnnnnnnnnnnnnnnnnnnnnnnnnnnnnnnnnnnnnnnnnnnnnnnnnnnnnnnnnnnnnnnnnnnnnnnnnnnnnnnnnnnnnnnnnnnnnnnnnnnnnnnnnnnnnnnnnnnnnnnnnnnnnnnnnnnnnnnnnnnnnnnnnnnnnnnnnnnnnnnnnnnnnnnnnnnnnnnnnnnnnnnnnnnnnnnnnnnnnnnnnnnnnnnnnnnnnnnnnnnnnnnnnnnnnnnnnnnnnnnnnnnnnnnnnnnnnnnnnnnnnnnnnnnnnnnnnnnnnnnnnnnnnnnnnnnnnnnnnnnnnnnnnnnnnnnnnnnnnnnnnnnnnnnnnnnnnnnnnnnnnnnnnnnnnnnnnnnnnnnnnnnnnnnnnnnnnnnnnnnnnnnnnnnnnnnnnnnnnnnnnnnnnnnnnnnnnnnnnnnnnnnnnnnnnnnnnnnnnnnnnnnnnnnnnnnnnnnnnnnnnnnnnnnnnnnnnnnnnnnnnnnnnnnnnnnnnnnnnnnnnnnnnnnnnnnnnnnnnnnnnnnnnnnnnnnnnnnnnnnnnnnnnnnnnnnnnnnnnnnnnnnnnnnnnnnnnnnnnnnnnnnnnnnnnnnnnnnnnnnnnnnnnnnnnnnnnnnnnnnnnnnnnnnnnnnnnnnnnnnnnnnnnnnnnnnnnnnnnnnnnnnnnnnnnnnnnnnnnnnnnnnnnnnnnnnnnnnnnnnnnnnnnnnnnnnnnnnnnnnnnnnnnnnnnnnnnnnnnnnnnnnnnnnnnnnnnnnnnnnnnnnnnnnnnnnnnnnnnnnnnnnnnnnnnnnnnnnnnnnnnnnnnnnnnnnnnnnnnnnnnnnnnnnnnnnnnnnnnnnnnnnnnnnnnnnnnnnnnnnnnnnnnnnnnnnnnnnnnnnnnnnnnnnnnnnnnnnnnnnnnnnnnnnnnnnnnnnnnnnnnnnnnnnnnnnnnnnnnnnnnnnnnnnnnnnnnnnnnnnnnnnnnnnnnnnnnnnnnnnnnnnnnnnnnnnnnnnnnnnnnnnnnnnnnnnnnnnnnnnnnnnnnnnnnnnnnnnnnnnnnnnnnnnnnnnnnnnnnnnnnnnnnnnnnnnnnnnnnnnnnnnnnnnnnnnnnnnnnnnnnnnnnnnnnnnnnnnnnnnnnnnnnnnnnnnnnnnnnnnnnnnnnnnnnnnnnnnnnnnnnnnnnnnnnnnnnnnnnnnnnnnnnnnnnnnnnnnnnnnnnnnnnnnnnnnnnnnnnnnnnnnnnnnnnnnnnnnnnnnnnnnnnnnnnnnnnnnnnnnnnnnnnnnnnnnnnnnnnnnnnnnnnnnnnnnnnnnnnnnnnnnnnnnnnnnnnnnnnnnnnnnnnnnnnnnnnnnnnnnnnnnnnnnnnnnnnnnnnnnnnnnnnnnnnnnnnnnnnnnnnnnnnnnnnnnnnnnnnnnnnnnnnnnnnnnnnnnnnnnnnnnnnnnnnnnnnnnnnnnnnnnnnnnnnnnnnnnnnnnnnnnnnnnnnnnnnnnnnnnnnnnnnnnnnnnnnnnnnnnnnnnnnnnnnnnnnnnnnnnnnnnnnnnnnnnnnnnnnnnnnnnnnnnnnnnnnnnnnnnnnnnnnnnnnnnnnnnnnnnnnnnnnnnnnnnnnnnnnnnnnnnnnnnnnnnnnnnnnnnnnnnnnnnnnnnnnnnnnnnnnnnnnnnnnnnnnnnnnnnnnnnnnnnnnnnnnnnnnnnnnnnnnnnnnnnnnnnnnnnnnnnnnnnnnnnnnnnnnnnnnnnnnnnnnnnnnnnnnnnnnnnnnnnnnnnnnnnnnnnnnnnnnnnnnnnnnnnnnnnnnnnnnnnnnnnnnnnnnnnnnnnnnnnnnnnnnnnnnnnnnnnnnnnnnnnnnnnnnnnnnnnnnnnnnnnnnnnnnnnnnnnnnnnnnnnnnnnnnnnnnnnnnnnnnnnnnnnnnnnnnnnnnnnnnnnnnnnnnnnnnnnnnnnnnnnnnnnnnnnnnnnnnnnnnnnnnnnnnnnnnnnnnnnnnnnnnnnnnnnnnnnnnnnnnnnnnnnnnnnnnnnnnnnnnnnnnnnnnnnnnnnnnnnnnnnnnnnnnnnnnnnnnnnnnnnnnnnnnnnnnnnnnnnnnnnnnnnnnnnnnnnnnnnnnnnnnnnnnnnnnnnnnnnnnnnnnnnnnnnnnnnnnnnnnnnnnnnnnnnnnnnnnnnnnnnnnnnnnnnnnnnnnnnnnnnnnnnnnnnnnnnnnnnnnnnnnnnnnnnnnnnnnnnnnnnnnnnnnnnnnnnnnnnnnnnnnnnnnnnnnnnnnnnnnnnnnnnnnnnnnnnnnnnnnnnnnnnnnnnnnnnnnnnnnnnnnnnnnnnnnnnnnnnnnnnnnnnnnnnnnnnnnnnnnnnnnnnnnnnnnnnnnnnnnnnnnnnnnnnnnnnnnnnnnnnnnnnnnnnnnnnnnnnnnnnnnnnnnnnnnnnnnnnnnnnnnnnnnnnnnnnnnnnnnnnnnnnnnnnnnnnnnnnnnnnnnnnnnnnnnnnnnnnnnnnnnnnnnnnnnnnnnnnnnnnnnnnnnnnnnnnnnnnnnnnnnnnnnnnnnnnnnnnnnnnnnnnnnnnnnnnnnnnnnnnnnnnnnnnnnnnnnnnnnnnnnnnnnnnnnnnnnnnnnnnnnnnnnnnnnnnnnnnnnnnnnnnnnnnnnnnnnnnnnnnnnnnnnnnnnnnnnnnnnnnnnnnnnnnnnnnnnnnnnnnnnnnnnnnnnnnnnnnnnnnnnnnnnnnnnnnnnnnnnnnnnnnnnnnnnnnnnnnnnnnnnnnnnnnnnnnnnnnnnnnnnnnnnnnnnnnnnnnnnnnnnnnnnnnnnnnnnnnnnnnnnnnnnnnnnnnnnnnnnnnnnnnnnnnnnnnnnnnnnnnnnnnnnnnnnnnnnnnnnnnnnnnnnnnnnnnnnnnnnnnnnnnnnnnnnnnnnnnnnnnnnnnnnnnnnnnnnnnnnnnnnnnnnnnnnnnnnnnnnnnnnnnnnnnnnnnnnnnnnnnnnnnnnnnnnnnnnnnnnnnnnnnnnnnnnnnnnnnnnnnnnnnnnnnnnnnnnnnnnnnnnnnnnnnnnnnnnnnnnnnnnnnnnnnnnnnnnnnnnnnnnnnnnnnnnnnnnnnnnnnnnnnnnnnnnnnnnnnnnnnnnnnnnnnnnnnnnnnnnnnnnnnnnnnnnnnnnnnnnnnnnnnnnnnnnnnnnnnnnnnnnnnnnnnnnnnnnnnnnnnnnnnnnnnnnnnnnnnnnnnnnnnnnnnnnnnnnnnnnnnnnnnnnnnnnnnnnnnnnnnnnnnnnnnnnnnnnnnnnnnnnnnnnnnnnnnnnnnnnnnnnnnnnnnnnnnnnnnnnnnnnnnnnnnnnnnnnnnnnnnnnnnnnnnnnnnnnnnnnnnnnnnnnnnnnnnnnnnnnnnnnnnnnnnnnnnnnnnnnnnnnnnnnnnnnnnnnnnnnnnnnnnnnnnnnnnnnnnnnnnnnnnnnnnnnnnnnnnnnnnnnnnnnnnnnnnnnnnnnnnnnnnnnnnnnnnnnnnnnnnnnnnnnnnnnnnnnnnnnnnnnnnnnnnnnnnnnnnnnnnnnnnnnnnnnnnnnnnnnnnnnnnnnnnnnnnnnnnnnnnnnnnnnnnnnnnnnnnnnnnnnnnnnnnnnnnnnnnnnnnnnnnnnnnnnnnnnnnnnnnnnnnnnnnnnnnnnnnnnnnnnnnnnnnnnnnnnnnnnnnnnnnnnnnnnnnnnnnnnnnnnnnnnnnnnnnnnnnnnnnnnnnnnnnnnnnnnnnnnnnnnnnnnnnnnnnnnnnnnnnnnnnnnnnnnnnnnnnnnnnnnnnnnnnnnnnnnnnnnnnnnnnnnnnnnnnnnnnnnnnnnnnnnnnnnnnnnnnnnnnnnnnnnnnnnnnnnnnnnnnnnnnnnnnnnnnnnnnnnnnnnnnnnnnnnnnnnnnnnnnnnnnnnnnnnnnnnnnnnnnnnnnnnnnnnnnnnnnnnnnnnnnnnnnnnnnnnnnnnnnnnnnnnnnnnnnnnnnnnnnnnnnnnnnnnnnnnnnnnnnnnnnnnnnnnnnnnnnnnnnnnnnnnnnnnnnnnnnnnnnnnnnnnnnnnnnnnnnnnnnnnnnnnnnnnnnnnnnnnnnnnnnnnnnnnnnnnnnnnnnnnnnnnnnnnnnnnnnnnnnnnnnnnnnnnnnnnnnnnnnnnnnnnnnnnnnnnnnnnnnnnnnnnnnnnnnnnnnnnnnnnnnnnnnnnnnnnnnnnnnnnnnnnnnnnnnnnnnnnnnnnnnnnnnnnnnnnnnnnnnnnnnnnnnnnnnnnnnnnnnnnnnnnnnnnnnnnnnnnnnnnnnnnnnnnnnnnnnnnnnnnnnnnnnnnnnnnnnnnnnnnnnnnnnnnnnnnnnnnnnnnnnnnnnnnnnnnnnnnnnnnnnnnnnnnnnnnnnnnnnnnnnnnnnnnnnnnnnnnnnnnnnnnnnnnnnnnnnnnnnnnnnnnnnnnnnnnnnnnnnnnnnnnnnnnnnnnnnnnnnnnnnnnnnnnnnnnnnnnnnnnnnnnnnnnnnnnnnnnnnnnnnnnnnnnnnnnnnnnnnnnnnnnnnnnnnnnnnnnnnnnnnnnnnnnnnnnnnnnnnnnnnnnnnnnnnnnnnnnnnnnnnnnnnnnnnnnnnnnnnnnnnnnnnnnnnnnnnnnnnnnnnnnnnnnnnnnnnnnnnnnnnnnnnnnnnnnnnnnnnnnnnnnnnnnnnnnnnnnnnnnnnnnnnnnnnnnnnnnnnnnnnnnnnnnnnnnnnnnnnnnnnnnnnnnnnnnnnnnnnnnnnnnnnnnnnnnnnnnnnnnnnnnnnnnnnnnnnnnnnnnnnnnnnnnnnnnnnnnnnnnnnnnnnnnnnnnnnnnnnnnnnnnnnnnnnnnnnnnnnnnnnnnnnnnnnnnnnnnnnnnnnnnnnnnnnnnnnnnnnnnnnnnnnnnnnnnnnnnnnnnnnnnnnnnnnnnnnnnnnnnnnnnnnnnnnnnnnnnnnnnnnnnnnnnnnnnnnnnnnnnnnnnnnnnnnnnnnnnnnnnnnnnnnnnnnnnnnnnnnnnnnnnnnnnnnnnnnnnnnnnnnnnnnnnnnnnnnnnnnnnnnnnnnnnnnnnnnnnnnnnnnnnnnnnnnnnnnnnnnnnnnnnnnnnnnnnnnnnnnnnnnnnnnnnnnnnnnnnnnnnnnnnnnnnnnnnnnnnnnnnnnnnnnnnnnnnnnnnnnnnnnnnnnnnnnnnnnnnnnnnnnnnnnnnnnnnnnnnnnnnnnnnnnnnnnnnnnnnnnnnnnnnnnnnnnnnnnnnnnnnnnnnnnnnnnnnnnnnnnnnnnnnnnnnnnnnnnnnnnnnnnnnnnnnnnnnnnnnnnnnnnnnnnnnnnnnnnnnnnnnnnnnnnnnnnnnnnnnnnnnnnnnnnnnnnnnnnnnnnnnnnnnnnnnnnnnnnnnnnnnnnnnnnnnnnnnnnnnnnnnnnnnnnnnnnnnnnnnnnnnnnnnnnnnnnnnnnnnnnnnnnnnnnnnnnnnnnnnnnnnnnnnnnnnnnnnnnnnnnnnnnnnnnnnnnnnnnnnnnnnnnnnnnnnnnnnnnnnnnnnnnnnnnnnnnnnnnnnnnnnnnnnnnnnnnnnnnnnnnnnnnnnnnnnnnnnnnnnnnnnnnnnnnnnnnnnnnnnnnnnnnnnnnnnnnnnnnnnnnnnnnnnnnnnnnnnnnnnnnnnnnnnnnnnnnnnnnnnnnnnnnnnnnnnnnnnnnnnnnnnnnnnnnnnnnnnnnnnnnnnnnnnnnnnnnnnnnnnnnnnnnnnnnnnnnnnnnnnnnnnnnnnnnnnnnnnnnnnnnnnnnnnnnnnnnnnnnnnnnnnnnnnnnnnnnnnnnnnnnnnnnnnnnnnnnnnnnnnnnnnnnnnnnnnnnnnnnnnnnnnnnnnnnnnnnnnnnnnnnnnnnnnnnnnnnnnnnnnnnnnnnnnnnnnnnnnnnnnnnnnnnnnnnnnnnnnnnnnnnnnnnnnnnnnnnnnnnnnnnnnnnnnnnnnnnnnnnnnnnnnnnnnnnnnnnnnnnnnnnnnnnnnnnnnnnnnnnnnnnnnnnnnnnnnnnnnnnnnnnnnnnnnnnnnnnnnnnnnnnnnnnnnnnnnnnnnnnnnnnnnnnnnnnnnnnnnnnnnnnnnnnnnnnnnnnnnnnnnnnnnnnnnnnnnnnnnnnnnnnnnnnnnnnnnnnnnnnnnnnnnnnnnnnnnnnnnnnnnnnnnnnnnnnnnnnnnnnnnnnnnnnnnnnnnnnnnnnnnnnnnnnnnnnnnnnnnnnnnnnnnnnnnnnnnnnnnnnnnnnnnnnnnnnnnnnnnnnnnnnnnnnnnnnnnnnnnnnnnnnnnnnnnnnnnnnnnnnnnnnnnnnnnnnnnnnnnnnnnnnnnnnnnnnnnnnnnnnnnnnnnnnnnnnnnnnnnnnnnnnnnnnnnnnnnnnnnnnnnnnnnnnnnnnnnnnnnnnnnnnnnnnnnnnnnnnnnnnnnnnnnnnnnnnnnnnnnnnnnnnnnnnnnnnnnnnnnnnnnnnnnnnnnnnnnnnnnnnnnnnnnnnnnnnnnnnnnnnnnnnnnnnnnnnnnnnnnnnnnnnnnnnnnnnnnnnnnnnnnnnnnnnnnnnnnnnnnnnnnnnnnnnnnnnnnnnnnnnnnnnnnnnnnnnnnnnnnnnnnnnnnnnnnnnnnnnnnnnnnnnnnnnnnnnnnnnnnnnnnnnnnnnnnnnnnnnnnnnnnnnnnnnnnnnnnnnnnnnnnnnnnnnnnnnnnnnnnnnnnnnnnnnnnnnnnnnnnnnnnnnnnnnnnnnnnnnnnnnnnnnnnnnnnnnnnnnnnnnnnnnnnnnnnnnnnnnnnnnnnnnnnnnnnnnnnnnnnnnnnnnnnnnnnnnnnnnnnnnnnnnnnnnnnnnnnnnnnnnnnnnnnnnnnnnnnnnnnnnnnnnnnnnnnnnnnnnnnnnnnnnnnnnnnnnnnnnnnnnnnnnnnnnnnnnnnnnnnnnnnnnnnnnnnnnnnnnnnnnnnnnnnnnnnnnnnnnnnnnnnnnnnnnnnnnnnnnnnnnnnnnnnnnnnnnnnnnnnnnnnnnnnnnnnnnnnnnnnnnnnnnnnnnnnnnnnnnnnnnnnnnnnnnnnnnnnnnnnnnnnnnnnnnnnnnnnnnnnnnnnnnnnnnnnnnnnnnnnnnnnnnnnnnnnnnnnnnnnnnnnnnnnnnnnnnnnnnnnnnnnnnnnnnnnnnnnnnnnnnnnnnnnnnnnnnnnnnnnnnnnnnnnnnnnnnnnnnnnnnnnnnnnnnnnnnnnnnnnnnnnnnnnnnnnnnnnnnnnnnnnnnnnnnnnnnnnnnnnnnnnnnnnnnnnnnnnnnnnnnnnnnnnnnnnnnnnnnnnnnnnnnnnnnnnnnnnnnnnnnnnnnnnnnnnnnnnnnnnnnnnnnnnnnnnnnnnnnnnnnnnnnnnnnnnnnnnnnnnnnnnnnnnnnnnnnnnnnnnnnnnnnnnnnnnnnnnnnnnnnnnnnnnnnnnnnnnnnnnnnnnnnnnnnnnnnnnnnnnnnnnnnnnnnnnnnnnnnnnnnnnnnnnnnnnnnnnnnnnnnnnnnnnnnnnnnnnnnnnnnnnnnnnnnnnnnnnnnnnnnnnnnnnnnnnnnnnnnnnnnnnnnnnnnnnnnnnnnnnnnnnnnnnnnnnnnnnnnnnnnnnnnnnnnnnnnnnnnnnnnnnnnnnnnnnnnnnnnnnnnnnnnnnnnnnnnnnnnnnnnnnnnnnnnnnnnnnnnnnnnnnnnnnnnnnnnnnnnnnnnnnnnnnnnnnnnnnnnnnnnnnnnnnnnnnnnnnnnnnnnnnnnnnnnnnnnnnnnnnnnnnnnnnnnnnnnnnnnnnnnnnnnnnnnnnnnnnnnnnnnnnnnnnnnnnnnnnnnnnnnnnnnnnnnnnnnnnnnnnnnnnnnnnnnnnnnnnnnnnnnnnnnnnnnnnnnnnnnnnnnnnnnnnnnnnnnnnnnnnnnnnnnnnnnnnnnnnnnnnnnnnnnnnnnnnnnnnnnnnnnnnnnnnnnnnnnnnnnnnnnnnnnnnnnnnnnnnnnnnnnnnnnnnnnnnnnnnnnnnnnnnnnnnnnnnnnnnnnnnnnnnnnnnnnnnnnnnnnnnnnnnnnnnnnnnnnnnnnnnnnnnnnnnnnnnnnnnnnnnnnnnnnnnnnnnnnnnnnnnnnnnnnnnnnnnnnnnnnnnnnnnnnnnnnnnnnnnnnnnnnnnnnnnnnnnnnnnnnnnnnnnnnnnnnnnnnnnnnnnnnnnnnnnnnnnnnnnnnnnnnnnnnnnnnnnnnnnnnnnnnnnnnnnnnnnnnnnnnnnnnnnnnnnnnnnnnnnnnnnnnnnnnnnnnnnnnnnnnnnnnnnnnnnnnnnnnnnnnnnnnnnnnnnnnnnnnnnnnnnnnnnnnnnnnnnnnnnnnnnnnnnnnnnnnnnnnnnnnnnnnnnnnnnnnnnnnnnnnnnnnnnnnnnnnnnnnnnnnnnnnnnnnnnnnnnnnnnnnnnnnnnnnnnnnnnnnnnnnnnnnnnnnnnnnnnnnnnnnnnnnnnnnnnnnnnnnnnnnnnnnnnnnnnnnnnnnnnnnnnnnnnnnnnnnnnnnnnnnnnnnnnnnnnnnnnnnnnnnnnnnnnnnnnnnnnnnnnnnnnnnnnnnnnnnnnnnnnnnnnnnnnnnnnnnnnnnnnnnnnnnnnnnnnnnnnnnnnnnnnnnnnnnnnnnnnnnnnnnnnnnnnnnnnnnnnnnnnnnnnnnnnnnnnnnnnnnnnnnnnnnnnnnnnnnnnnnnnnnnnnnnnnnnnnnnnnnnnnnnnnnnnnnnnnnnnnnnnnnnnnnnnnnnnnnnnnnnnnnnnnnnnnnnnnnnnnnnnnnnnnnnnnnnnnnnnnnnnnnnnnnnnnnnnnnnnnnnnnnnnnnnnnnnnnnnnnnnnnnnnnnnnnnnnnnnnnnnnnnnnnnnnnnnnnnnnnnnnnnnnnnnnnnnnnnnnnnnnnnnnnnnnnnnnnnnnnnnnnnnnnnnnnnnnnnnnnnnnnnnnnnnnnnnnnnnnnnnnnnnnnnnnnnnnnnnnnnnnnnnnnnnnnnnnnnnnnnnnnnnnnnnnnnnnnnnnnnnnnnnnnnnnnnnnnnnnnnnnnnnnnnnnnnnnnnnnnnnnnnnnnnnnnnnnnnnnnnnnnnnnnnnnnnnnnnnnnnnnnnnnnnnnnnnnnnnnnnnnnnnnnnnnnnnnnnnnnnnnnnnnnnnnnnnnnnnnnnnnnnnnnnnnnnnnnnnnnnnnnnnnnnnnnnnnnnnnnnnnnnnnnnnnnnnnnnnnnnnnnnnnnnnnnnnnnnnnnnnnnnnnnnnnnnnnnnnnnnnnnnnnnnnnnnnnnnnnnnnnnnnnnnnnnnnnnnnnnnnnnnnnnnnnnnnnnnnnnnnnnnnnnnnnnnnnnnnnnnnnnnnnnnnnnnnnnnnnnnnnnnnnnnnnnnnnnnnnnnnnnnnnnnnnnnnnnnnnnnnnnnnnnnnnnnnnnnnnnnnnnnnnnnnnnnnnnnnnnnnnnnnnnnnnnnnnnnnnnnnnnnnnnnnnnnnnnnnnnnnnnnnnnnnnnnnnnnnnnnnnnnnnnnnnnnnnnnnnnnnnnnnnnnnnnnnnnnnnnnnnnnnnnnnnnnnnnnnnnnnnnnnnnnnnnnnnnnnnnnnnnnnnnnnnnnnnnnnnnnnnnnnnnnnnnnnnnnnnnnnnnnnnnnnnnnnnnnnnnnnnnnnnnnnnnnnnnnnnnnnnnnnnnnnnnnnnnnnnnnnnnnnnnnnnnnnnnnnnnnnnnnnnnnnnnnnnnnnnnnnnnnnnnnnnnnnnnnnnnnnnnnnnnnnnnnnnnnnnnnnnnnnnnnnnnnnnnnnnnnnnnnnnnnnnnnnnnnnnnnnnnnnnnnnnnnnnnnnnnnnnnnnnnnnnnnnnnnnnnnnnnnnnnnnnnnnnnnnnnnnnnnnnnnnnnnnnnnnnnnnnnnnnnnnnnnnnnnnnnnnnnnnnnnnnnnnnnnnnnnnnnnnnnnnnnnnnnnnnnnnnnnnnnnnnnnnnnnnnnnnnnnnnnnnnnnnnnnnnnnnnnnnnnnnnnnnnnnnnnnnnnnnnnnnnnnnnnnnnnnnnnnnnnnnnnnnnnnnnnnnnnnnnnnnnnnnnnnnnnnnnnnnnnnnnnnnnnnnnnnnnnnnnnnnnnnnnnnnnnnnnnnnnnnnnnnnnnnnnnnnnnnnnnnnnnnnnnnnnnnnnnnnnnnnnnnnnnnnnnnnnnnnnnnnnnnnnnnnnnnnnnnnnnnnnnnnnnnnnnnnnnnnnnnnnnnnnnnnnnnnnnnnnnnnnnnnnnnnnnnnnnnnnnnnnnnnnnnnnnnnnnnnnnnnnnnnnnnnnnnnnnnnnnnnnnnnnnnnnnnnnnnnnnnnnnnnnnnnnnnnnnnnnnnnnnnnnnnnnnnnnnnnnnnnnnnnnnnnnnnnnnnnnnnnnnnnnnnnnnnnnnnnnnnnnnnnnnnnnnnnnnnnnnnnnnnnnnnnnnnnnnnnnnnnnnnnnnnnnnnnnnnnnnnnnnnnnnnnnnnnnnnnnnnnnnnnnnnnnnnnnnnnnnnnnnnnnnnnnnnnnnnnnnnnnnnnnnnnnnnnnnnnnnnnnnnnnnnnnnnnnnnnnnnnnnnnnnnnnnnnnnnnnnnnnnnnnnnnnnnnnnnnnnnnnnnnnnnnnnnnnnnnnnnnnnnnnnnnnnnnnnnnnnnnnnnnnnnnnnnnnnnnnnnnnnnnnnnnnnnnnnnnnnnnnnnnnnnnnnnnnnnnnnnnnnnnnnnnnnnnnnnnnnnnnnnnnnnnnnnnnnnnnnnnnnnnnnnnnnnnnnnnnnnnnnnnnnnnnnnnnnnnnnnnnnnnnnnnnnnnnnnnnnnnnnnnnnnnnnnnnnnnnnnnnnnnnnnnnnnnnnnnnnnnnnnnnnnnnnnnnnnnnnnnnnnnnnnnnnnnnnnnnnnnnnnnnnnnnnnnnnnnnnnnnnnnnnnnnnnnnnnnnnnnnnnnnnnnnnnnnnnnnnnnnnnnnnnnnnnnnnnnnnnnnnnnnnnnnnnnnnnnnnnnnnnnnnnnnnnnnnnnnnnnnnnnnnnnnnnnnnnnnnnnnnnnnnnnnnnnnnnnnnnnnnnnnnnnnnnnnnnnnnnnnnnnnnnnnnnnnnnnnnnnnnnnnnnnnnnnnnnnnnnnnnnnnnnnnnnnnnnnnnnnnnnnnnnnnnnnnnnnnnnnnnnnnnnnnnnnnnnnnnnnnnnnnnnnnnnnnnnnnnnnnnnnnnnnnnnnnnnnnnnnnnnnnnnnnnnnnnnnnnnnnnnnnnnnnnnnnnnnnnnnnnnnnnnnnnnnnnnnnnnnnnnnnnnnnnnnnnnnnnnnnnnnnnnnnnnnnnnnnnnnnnnnnnnnnnnnnnnnnnnnnnnnnnnnnnnnnnnnnnnnnnnnnnnnnnnnnnnnnnnnnnnnnnnnnnnnnnnnnnnnnnnnnnnnnnnnnnnnnnnnnnnnnnnnnnnnnnnnnnnnnnnnnnnnnnnnnnnnnnnnnnnnnnnnnnnnnnnnnnnnnnnnnnnnnnnnnnnnnnnnnnnnnnnnnnnnnnnnnnnnnnnnnnnnnnnnnnnnnnnnnnnnnnnnnnnnnnnnnnnnnnnnnnnnnnnnnnnnnnnnnnnnnnnnnnnnnnnnnnnnnnnnnnnnnnnnnnnnnnnnnnnnnnnnnnnnnnnnnnnnnnnnnnnnnnnnnnnnnnnnnnnnnnnnnnnnnnnnnnnnnnnnnnnnnnnnnnnnnnnnnnnnnnnnnnnnnnnnnnnnnnnnnnnnnnnnnnnnnnnnnnnnnnnnnnnnnnnnnnnnnnnnnnnnnnnnnnnnnnnnnnnnnnnnnnnnnnnnnnnnnnnnnnnnnnnnnnnnnnnnnnnnnnnnnnnnnnnnnnnnnnnnnnnnnnnnnnnnnnnnnnnnnnnnnnnnnnnnnnnnnnnnnnnnnnnnnnnnnnnnnnnnnnnnnnnnnnnnnnnnnnnnnnnnnnnnnnnnnnnnnnnnnnnnnnnnnnnnnnnnnnnnnnnnnnnnnnnnnnnnnnnnnnnnnnnnnnnnnnnnnnnnnnnnnnnnnnnnnnnnnnnnnnnnnnnnnnnnnnnnnnnnnnnnnnnnnnnnnnnnnnnnnnnnnnnnnnnnnnnnnnnnnnnnnnnnnnnnnnnnnnnnnnnnnnnnnnnnnnnnnnnnnnnnnnnnnnnnnnnnnnnnnnnnnnnnnnnnnnnnnnnnnnnnnnnnnnnnnnnnnnnnnnnnnnnnnnnnnnnnnnnnnnnnnnnnnnnnnnnnnnnnnnnnnnnnnnnnnnnnnnnnnnnnnnnnnnnnnnnnnnnnnnnnnnnnnnnnnnnnnnnnnnnnnnnnnnnnnnnnnnnnnnnnnnnnnnnnnnnnnnnnnnnnnnnnnnnnnnnnnnnnnnnnnnnnnnnnnnnnnnnnnnnnnnnnnnnnnnnnnnnnnnnnnnnnnnnnnnnnnnnnnnnnnnnnnnnnnnnnnnnnnnnnnnnnnnnnnnnnnnnnnnnnnnnnnnnnnnnnnnnnnnnnnnnnnnnnnnnnnnnnnnnnnnnnnnnnnnnnnnnnnnnnnnnnnnnnnnnnnnnnnnnnnnnnnnnnnnnnnnnnnnnnnnnnnnnnnnnnnnnnnnnnnnnnnnnnnnnnnnnnnnnnnnnnnnnnnnnnnnnnnnnnnnnnnnnnnnnnnnnnnnnnnnnnnnnnnnnnnnnnnnnnnnnnnnnnnnnnnnnnnnnnnnnnnnnnnnnnnnnnnnnnnnnnnnnnnnnnnnnnnnnnnnnnnnnnnnnnnnnnnnnnnnnnnnnnnnnnnnnnnnnnnnnnnnnnnnnnnnnnnnnnnnnnnnnnnnnnnnnnnnnnnnnnnnnnnnnnnnnnnnnnnnnnnnnnnnnnnnnnnnnnnnnnnnnnnnnnnnnnnnnnnnnnnnnnnnnnnnnnnnnnnnnnnnnnnnnnnnnnnnnnnnnnnnnnnnnnnnnnnnnnnnnnnnnnnnnnnnnnnnnnnnnnnnnnnnnnnnnnnnnnnnnnnnnnnnnnnnnnnnnnnnnnnnnnnnnnnnnnnnnnnnnnnnnnnnnnnnnnnnnnnnnnnnnnnnnnnnnnnnnnnnnnnnnnnnnnnnnnnnnnnnnnnnnnnnnnnnnnnnnnnnnnnnnnnnnnnnnnnnnnnnnnnnnnnnnnnnnnnnnnnnnnnnnnnnnnnnnnnnnnnnnnnnnnnnnnnnnnnnnnnnnnnnnnnnnnnnnnnnnnnnnnnnnnnnnnnnnnnnnnnnnnnnnnnnnnnnnnnnnnnnnnnnnnnnnnnnnnnnnnnnnnnnnnnnnnnnnnnnnnnnnnnnnnnnnnnnnnnnnnnnnnnnnnnnnnnnnnnnnnnnnnnnnnnnnnnnnnnnnnnnnnnnnnnnnnnnnnnnnnnnnnnnnnnnnnnnnnnnnnnnnnnnnnnnnnnnnnnnnnnnnnnnnnnnnnnnnnnnnnnnnnnnnnnnnnnnnnnnnnnnnnnnnnnnnnnnnnnnnnnnnnnnnnnnnnnnnnnnnnnnnnnnnnnnnnnnnnnnnnnnnnnnnnnnnnnnnnnnnnnnnnnnnnnnnnnnnnnnnnnnnnnnnnnnnnnnnnnnnnnnnnnnnnnnnnnnnnnnnnnnnnnnnnnnnnnnnnnnnnnnnnnnnnnnnnnnnnnnnnnnnnnnnnnnnnnnnnnnnnnnnnnnnnnnnnnnnnnnnnnnnnnnnnnnnnnnnnnnnnnnnnnnnnnnnnnnnnnnnnnnnnnnnnnnnnnnnnnnnnnnnnnnnnnnnnnnnnnnnnnnnnnnnnnnnnnnnnnnnnnnnnnnnnnnnnnnnnnnnnnnnnnnnnnnnnnnnnnnnnnnnnnnnnnnnnnnnnnnnnnnnnnnnnnnnnnnnnnnnnnnnnnnnnnnnnnnnnnnnnnnnnnnnnnnnnnnnnnnnnnnnnnnnnnnnnnnnnnnnnnnnnnnnnnnnnnnnnnnnnnnnnnnnnnnnnnnnnnnnnnnnnnnnnnnnnnnnnnnnnnnnnnnnnnnnnnnnnnnnnnnnnnnnnnnnnnnnnnnnnnnnnnnnnnnnnnnnnnnnnnnnnnnnnnnnnnnnnnnnnnnnnnnnnnnnnnnnnnnnnnnnnnnnnnnnnnnnnnnnnnnnnnnnnnnnnnnnnnnnnnnnnnnnnnnnnnnnnnnnnnnnnnnnnnnnnnnnnnnnnnnnnnnnnnnnnnnnnnnnnnnnnnnnnnnnnnnnnnnnnnnnnnnnnnnnnnnnnnnnnnnnnnnnnnnnnnnnnnnnnnnnnnnnnnnnnnnnnnnnnnnnnnnnnnnnnnnnnnnnnnnnnnnnnnnnnnnnnnnnnnnnnnnnnnnnnnnnnnnnnnnnnnnnnnnnnnnnnnnnnnnnnnnnnnnnnnnnnnnnnnnnnnnnnnnnnnnnnnnnnnnnnnnnnnnnnnnnnnnnnnnnnnnnnnnnnnnnnnnnnnnnnnnnnnnnnnnnnnnnnnnnnnnnnnnnnnnnnnnnnnnnnnnnnnnnnnnnnnnnnnnnnnnnnnnnnnnnnnnnnnnnnnnnnnnnnnnnnnnnnnnnnnnnnnnnnnnnnnnnnnnnnnnnnnnnnnnnnnnnnnnnnnnnnnnnnnnnnnnnnnnnnnnnnnnnnnnnnnnnnnnnnnnnnnnnnnnnnnnnnnnnnnnnnnnnnnnnnnnnnnnnnnnnnnnnnnnnnnnnnnnnnnnnnnnnnnnnnnnnnnnnnnnnnnnnnnnnnnnnnnnnnnnnnnnnnnnnnnnnnnnnnnnnnnnnnnnnnnnnnnnnnnnnnnnnnnnnnnnnnnnnnnnnnnnnnnnnnnnnnnnnnnnnnnnnnnnnnnnnnnnnnnnnnnnnnnnnnnnnnnnnnnnnnnnnnnnnnnnnnnnnnnnnnnnnnnnnnnnnnnnnnnnnnnnnnnnnnnnnnnnnnnnnnnnnnnnnnnnnnnnnnnnnnnnnnnnnnnnnnnnnnnnnnnnnnnnnnnnnnnnnnnnnnnnnnnnnnnnnnnnnnnnnnnnnnnnnnnnnnnnnnnnnnnnnnnnnnnnnnnnnnnnnnnnnnnnnnnnnnnnnnnnnnnnnnnnnnnnnnnnnnnnnnnnnnnnnnnnnnnnnnnnnnnnnnnnnnnnnnnnnnnnnnnnnnnnnnnnnnnnnnnnnnnnnnnnnnnnnnnnnnnnnnnnnnnnnnnnnnnnnnnnnnnnnnnnnnnnnnnnnnnnnnnnnnnnnnnnnnnnnnnnnnnnnnnnnnnnnnnnnnnnnnnnnnnnnnnnnnnnnnnnnnnnnnnnnnnnnnnnnnnnnnnnnnnnnnnnnnnnnnnnnnnnnnnnnnnnnnnnnnnnnnnnnnnnnnnnnnnnnnnnnnnnnnnnnnnnnnnnnnnnnnnnnnnnnnnnnnnnnnnnnnnnnnnnnnnnnnnnnnnnnnnnnnnnnnnnnnnnnnnnnnnnnnnnnnnnnnnnnnnnnnnnnnnnnnnnnnnnnnnnnnnnnnnnnnnnnnnnnnnnnnnnnnnnnnnnnnnnnnnnnnnnnnnnnnnnnnnnnnnnnnnnnnnnnnnnnnnnnnnnnnnnnnnnnnnnnnnnnnnnnnnnnnnnnnnnnnnnnnnnnnnnnnnnnnnnnnnnnnnnnnnnnnnnnnnnnnnnnnnnnnnnnnnnnnnnnnnnnnnnnnnnnnnnnnnnnnnnnnnnnnnnnnnnnnnnnnnnnnnnnnnnnnnnnnnnnnnnnnnnnnnnnnnnnnnnnnnnnnnnnnnnnnnnnnnnnnnnnnnnnnnnnnnnnnnnnnnnnnnnnnnnnnnnnnnnnnnnnnnnnnnnnnnnnnnnnnnnnnnnnnnnnnnnnnnnnnnnnnnnnnnnnnnnnnnnnnnnnnnnnnnnnnnnnnnnnnnnnnnnnnnnnnnnnnnnnnnnnnnnnnnnnnnnnnnnnnnnnnnnnnnnnnnnnnnnnnnnnnnnnnnnnnnnnnnnnnnnnnnnnnnnnnnnnnnnnnnnnnnnnnnnnnnnnnnnnnnnnnnnnnnnnnnnnnnnnnnnnnnnnnnnnnnnnnnnnnnnnnnnnnnnnnnnnnnnnnnnnnnnnnnnnnnnnnnnnnnnnnnnnnnnnnnnnnnnnnnnnnnnnnnnnnnnnnnnnnnnnnnnnnnnnnnnnnnnnnnnnnnnnnnnnnnnnnnnnnnnnnnnnnnnnnnnnnnnnnnnnnnnnnnnnnnnnnnnnnnnnnnnnnnnnnnnnnnnnnnnnnnnnnnnnnnnnnnnnnnnnnnnnnnnnnnnnnnnnnnnnnnnnnnnnnnnnnnnnnnnnnnnnnnnnnnnnnnnnnnnnnnnnnnnnnnnnnnnnnnnnnnnnnnnnnnnnnnnnnnnnnnnnnnnnnnnnnnnnnnnnnnnnnnnnnnnnnnnnnnnnnnnnnnnnnnnnnnnnnnnnnnnnnnnnnnnnnnnnnnnnnnnnnnnnnnnnnnnnnnnnnnnnnnnnnnnnnnnnnnnnnnnnnnnnnnnnnnnnnnnnnnnnnnnnnnnnnnnnnnnnnnnnnnnnnnnnnnnnnnnnnnnnnnnnnnnnnnnnnnnnnnnnnnnnnnnnnnnnnnnnnnnnnnnnnnnnnnnnnnnnnnnnnnnnnnnnnnnnnnnnnnnnnnnnnnnnnnnnnnnnnnnnnnnnnnnnnnnnnnnnnnnnnnnnnnnnnnnnnnnnnnnnnnnnnnnnnnnnnnnnnnnnnnnnnnnnnnnnnnnnnnnnnnnnnnnnnnnnnnnnnnnnnnnnnnnnnnnnnnnnnnnnnnnnnnnnnnnnnnnnnnnnnnnnnnnnnnnnnnnnnnnnnnnnnnnnnnnnnnnnnnnnnnnnnnnnnnnnnnnnnnnnnnnnnnnnnnnnnnnnnnnnnnnnnnnnnnnnnnnnnnnnnnnnnnnnnnnnnnnnnnnnnnnnnnnnnnnnnnnnnnnnnnnnnnnnnnnnnnnnnnnnnnnnnnnnnnnnnnnnnnnnnnnnnnnnnnnnnnnnnnnnnnnnnnnnnnnnnnnnnnnnnnnnnnnnnnnnnnnnnnnnnnnnnnnnnnnnnnnnnnnnnnnnnnnnnnnnnnnnnnnnnnnnnnnnnnnnnnnnnnnnnnnnnnnnnnnnnnnnnnnnnnnnnnnnnnnnnnnnnnnnnnnnnnnnnnnnnnnnnnnnnnnnnnnnnnnnnnnnnnnnnnnnnnnnnnnnnnnnnnnnnnnnnnnnnnnnnnnnnnnnnnnnnnnnnnnnnnnnnnnnnnnnnnnnnnnnnnnnnnnnnnnnnnnnnnnnnnnnnnnnnnnnnnnnnnnnnnnnnnnnnnnnnnnnnnnnnnnnnnnnnnnnnnnnnnnnnnnnnnnnnnnnnnnnnnnnnnnnnnnnnnnnnnnnnnnnnnnnnnnnnnnnnnnnnnnnnnnnnnnnnnnnnnnnnnnnnnnnnnnnnnnnnnnnnnnnnnnnnnnnnnnnnnnnnnnnnnnnnnnnnnnnnnnnnnnnnnnnnnnnnnnnnnnnnnnnnnnnnnnnnnnnnnnnnnnnnnnnnnnnnnnnnnnnnnnnnnnnnnnnnnnnnnnnnnnnnnnnnnnnnnnnnnnnnnnnnnnnnnnnnnnnnnnnnnnnnnnnnnnnnnnnnnnnnnnnnnnnnnnnnnnnnnnnnnnnnnnnnnnnnnnnnnnnnnnnnnnnnnnnnnnnnnnnnnnnnnnnnnnnnnnnnnnnnnnnnnnnnnnnnnnnnnnnnnnnnnnnnnnnnnnnnnnnnnnnnnnnnnnnnnnnnnnnnnnnnnnnnnnnnnnnnnnnnnnnnnnnnnnnnnnnnnnnnnnnnnnnnnnnnnnnnnnnnnnnnnnnnnnnnnnnnnnnnnnnnnnnnnnnnnnnnnnnnnnnnnnnnnnnnnnnnnnnnnnnnnnnnnnnnnnnnnnnnnnnnnnnnnnnnnnnnnnnnnnnnnnnnnnnnnnnnnnnnnnnnnnnnnnnnnnnnnnnnnnnnnnnnnnnnnnnnnnnnnnnnnnnnnnnnnnnnnnnnnnnnnnnnnnnnnnnnnnnnnnnnnnnnnnnnnnnnnnnnnnnnnnnnnnnnnnnnnnnnnnnnnnnnnnnnnnnnnnnnnnnnnnnnnnnnnnnnnnnnnnnnnnnnnnnnnnnnnnnnnnnnnnnnnnnnnnnnnnnnnnnnnnnnnnnnnnnnnnnnnnnnnnnnnnnnnnnnnnnnnnnnnnnnnnnnnnnnnnnnnnnnnnnnnnnnnnnnnnnnnnnnnnnnnnnnnnnnnnnnnnnnnnnnnnnnnnnnnnnnnnnnnnnnnnnnnnnnnnnnnnnnnnnnnnnnnnnnnnnnnnnnnnnnnnnnnnnnnnnnnnnnnnnnnnnnnnnnnnnnnnnnnnnnnnnnnnnnnnnnnnnnnnnnnnnnnnnnnnnnnnnnnnnnnnnnnnnnnnnnnnnnnnnnnnnnnnnnnnnnnnnnnnnnnnnnnnnnnnnnnnnnnnnnnnnnnnnnnnnnnnnnnnnnnnnnnnnnnnnnnnnnnnnnnnnnnnnnnnnnnnnnnnnnnnnnnnnnnnnnnnnnnnnnnnnnnnnnnnnnnnnnnnnnnnnnnnnnnnnnnnnnnnnnnnnnnnnnnnnnnnnnnnnnnnnnnnnnnnnnnnnnnnnnnnnnnnnnnnnnnnnnnnnnnnnnnnnnnnnnnnnnnnnnnnnnnnnnnnnnnnnnnnnnnnnnnnnnnnnnnnnnnnnnnnnnnnnnnnnnnnnnnnnnnnnnnnnnnnnnnnnnnnnnnnnnnnnnnnnnnnnnnnnnnnnnnnnnnnnnnnnnnnnnnnnnnnnnnnnnnnnnnnnnnnnnnnnnnnnnnnnnnnnnnnnnnnnnnnnnnnnnnnnnnnnnnnnnnnnnnnnnnnnnnnnnnnnnnnnnnnnnnnnnnnnnnnnnnnnnnnnnnnnnnnnnnnnnnnnnnnnnnnnnnnnnnnnnnnnnnnnnnnnnnnnnnnnnnnnnnnnnnnnnnnnnnnnnnnnnnnnnnnnnnnnnnnnnnnnnnnnnnnnnnnnnnnnnnnnnnnnnnnnnnnnnnnnnnnnnnnnnnnnnnnnnnnnnnnnnnnnnnnnnnnnnnnnnnnnnnnnnnnnnnnnnnnnnnnnnnnnnnnnnnnnnnnnnnnnnnnnnnnnnnnnnnnnnnnnnnnnnnnnnnnnnnnnnnnnnnnnnnnnnnnnnnnnnnnnnnnnnnnnnnnnnnnnnnnnnnnnnnnnnnnnnnnnnnnnnnnnnnnnnnnnnnnnnnnnnnnnnnnnnnnnnnnnnnnnnnnnnnnnnnnnnnnnnnnnnnnnnnnnnnnnnnnnnnnnnnnnnnnnnnnnnnnnnnnnnnnnnnnnnnnnnnnnnnnnnnnnnnnnnnnnnnnnnnnnnnnnnnnnnnnnnnnnnnnnnnnnnnnnnnnnnnnnnnnnnnnnnnnnnnnnnnnnnnnnnnnnnnnnnnnnnnnnnnnnnnnnnnnnnnnnnnnnnnnnnnnnnnnnnnnnnnnnnnnnnnnnnnnnnnnnnnnnnnnnnnnnnnnnnnnnnnnnnnnnnnnnnnnnnnnnnnnnnnnnnnnnnnnnnnnnnnnnnnnnnnnnnnnnnnnnnnnnnnnnnnnnnnnnnnnnnnnnnnnnnnnnnnnnnnnnnnnnnnnnnnnnnnnnnnnnnnnnnnnnnnnnnnnnnnnnnnnnnnnnnnnnnnnnnnnnnnnnnnnnnnnnnnnnnnnnnnnnnnnnnnnnnnnnnnnnnnnnnnnnnnnnnnnnnnnnnnnnnnnnnnnnnnnnnnnnnnnnnnnnnnnnnnnnnnnnnnnnnnnnnnnnnnnnnnnnnnnnnnnnnnnnnnnnnnnnnnnnnnnnnnnnnnnnnnnnnnnnnnnnnnnnnnnnnnnnnnnnnnnnnnnnnnnnnnnnnnnnnnnnnnnnnnnnnnnnnnnnnnnnnnnnnnnnnnnnnnnnnnnnnnnnnnnnnnnnnnnnnnnnnnnnnnnnnnnnnnnnnnnnnnnnnnnnnnnnnnnnnnnnnnnnnnnnnnnnnnnnnnnnnnnnnnnnnnnnnnnnnnnnnnnnnnnnnnnnnnnnnnnnnnnnnnnnnnnnnnnnnnnnnnnnnnnnnnnnnnnnnnnnnnnnnnnnnnnnnnnnnnnnnnnnnnnnnnnnnnnnnnnnnnnnnnnnnnnnnnnnnnnnnnnnnnnnnnnnnnnnnnnnnnnnnnnnnnnnnnnnnnnnnnnnnnnnnnnnnnnnnnnnnnnnnnnnnnnnnnnnnnnnnnnnnnnnnnnnnnnnnnnnnnnnnnnnnnnnnnnnnnnnnnnnnnnnnnnnnnnnnnnnnnnnnnnnnnnnnnnnnnnnnnnnnnnnnnnnnnnnnnnnnnnnnnnnnnnnnnnnnnnnnnnnnnnnnnnnnnnnnnnnnnnnnnnnnnnnnnnnnnnnnnnnnnnnnnnnnnnnnnnnnnnnnnnnnnnnnnnnnnnnnnnnnnnnnnnnnnnnnnnnnnnnnnnnnnnnnnnnnnnnnnnnnnnnnnnnnnnnnnnnnnnnnnnnnnnnnnnnnnnnnnnnnnnnnnnnnnnnnnnnnnnnnnnnnnnnnnnnnnnnnnnnnnnnnnnnnnnnnnnnnnnnnnnnnnnnnnnnnnnnnnnnnnnnnnnnnnnnnnnnnnnnnnnnnnnnnnnnnnnnnnnnnnnnnnnnnnnnnnnnnnnnnnnnnnnnnnnnnnnnnnnnnnnnnnnnnnnnnnnnnnnnnnnnnnnnnnnnnnnnnnnnnnnnnnnnnnnnnnnnnnnnnnnnnnnnnnnnnnnnnnnnnnnnnnnnnnnnnnnnnnnnnnnnnnnnnnnnnnnnnnnnnnnnnnnnnnnnnnnnnnnnnnnnnnnnnnnnnnnnnnnnnnnnnnnnnnnnnnnnnnnnnnnnnnnnnnnnnnnnnnnnnnnnnnnnnnnnnnnnnnnnnnnnnnnnnnnnnnnnnnnnnnnnnnnnnnnnnnnnnnnnnnnnnnnnnnnnnnnnnnnnnnnnnnnnnnnnnnnnnnnnnnnnnnnnnnnnnnnnnnnnnnnnnnnnnnnnnnnnnnnnnnnnnnnnnnnnnnnnnnnnnnnnnnnnnnnnnnnnnnnnnnnnnnnnnnnnnnnnnnnnnnnnnnnnnnnnnnnnnnnnnnnnnnnnnnnnnnnnnnnnnnnnnnnnnnnnnnnnnnnnnnnnnnnnnnnnnnnnnnnnnnnnnnnnnnnnnnnnnnnnnnnnnnnnnnnnnnnnnnnnnnnnnnnnnnnnnnnnnnnnnnnnnnnnnnnnnnnnnnnnnnnnnnnnnnnnnnnnnnnnnnnnnnnnnnnnnnnnnnnnnnnnnnnnnnnnnnnnnnnnnnnnnnnnnnnnnnnnnnnnnnnnnnnnnnnnnnnnnnnnnnnnnnnnnnnnnnnnnnnnnnnnnnnnnnnnnnnnnnnnnnnnnnnnnnnnnnnnnnnnnnnnnnnnnnnnnnnnnnnnnnnnnnnnnnnnnnnnnnnnnnnnnnnnnnnnnnnnnnnnnnnnnnnnnnnnnnnnnnnnnnnnnnnnnnnnnnnnnnnnnnnnnnnnnnnnnnnnnnnnnnnnnnnnnnnnnnnnnnnnnnnnnnnnnnnnnnnnnnnnnnnnnnnnnnnnnnnnnnnnnnnnnnnnnnnnnnnnnnnnnnnnnnnnnnnnnnnnnnnnnnnnnnnnnnnnnnnnnnnnnnnnnnnnnnnnnnnnnnnnnnnnnnnnnnnnnnnnnnnnnnnnnnnnnnnnnnnnnnnnnnnnnnnnnnnnnnnnnnnnnnnnnnnnnnnnnnnnnnnnnnnnnnnnnnnnnnnnnnnnnnnnnnnnnnnnnnnnnnnnnnnnnnnnnnnnnnnnnnnnnnnnnnnnnnnnnnnnnnnnnnnnnnnnnnnnnnnnnnnnnnnnnnnnnnnnnnnnnnnnnnnnnnnnnnnnnnnnnnnnnnnnnnnnnnnnnnnnnnnnnnnnnnnnnnnnnnnnnnnnnnnnnnnnnnnnnnnnnnnnnnnnnnnnnnnnnnnnnnnnnnnnnnnnnnnnnnnnnnnnnnnnnnnnnnnnnnnnnnnnnnnnnnnnnnnnnnnnnnnnnnnnnnnnnnnnnnnnnnnnnnnnnnnnnnnnnnnnnnnnnnnnnnnnnnnnnnnnnnnnnnnnnnnnnnnnnnnnnnnnnnnnnnnnnnnnnnnnnnnnnnnnnnnnnnnnnnnnnnnnnnnnnnnnnnnnnnnnnnnnnnnnnnnnnnnnnnnnnnnnnnnnnnnnnnnnnnnnnnnnnnnnnnnnnnnnnnnnnnnnnnnnnnnnnnnnnnnnnnnnnnnnnnnnnnnnnnnnnnnnnnnnnnnnnnnnnnnnnnnnnnnnnnnnnnnnnnnnnnnnnnnnnnnnnnnnnnnnnnnnnnnnnnnnnnnnnnnnnnnnnnnnnnnnnnnnnnnnnnnnnnnnnnnnnnnnnnnnnnnnnnnnnnnnnnnnnnnnnnnnnnnnnnnnnnnnnnnnnnnnnnnnnnnnnnnnnnnnnnnnnnnnnnnnnnnnnnnnnnnnnnnnnnnnnnnnnnnnnnnnnnnnnnnnnnnnnnnnnnnnnnnnnnnnnnnnnnnnnnnnnnnnnnnnnnnnnnnnnnnnnnnnnnnnnnnnnnnnnnnnnnnnnnnnnnnnnnnnnnnnnnnnnnnnnnnnnnnnnnnnnnnnnnnnnnnnnnnnnnnnnnnnnnnnnnnnnnnnnnnnnnnnnnnnnnnnnnnnnnnnnnnnnnnnnnnnnnnnnnnnnnnnnnnnnnnnnnnnnnnnnnnnnnnnnnnnnnnnnnnnnnnnnnnnnnnnnnnnnnnnnnnnnnnnnnnnnnnnnnnnnnnnnnnnnnnnnnnnnnnnnnnnnnnnnnnnnnnnnnnnnnnnnnnnnnnnnnnnnnnnnnnnnnnnnnnnnnnnnnnnnnnnnnnnnnnnnnnnnnnnnnnnnnnnnnnnnnnnnnnnnnnnnnnnnnnnnnnnnnnnnnnnnnnnnnnnnnnnnnnnnnnnnnnnnnnnnnnnnnnnnnnnnnnnnnnnnnnnnnnnnnnnnnnnnnnnnnnnnnnnnnnnnnnnnnnnnnnnnnnnnnnnnnnnnnnnnnnnnnnnnnnnnnnnnnnnnnnnnnnnnnnnnnnnnnnnnnnnnnnnnnnnnnnnnnnnnnnnnnnnnnnnnnnnnnnnnnnnnnnnnnnnnnnnnnnnnnnnnnnnnnnnnnnnnnnnnnnnnnnnnnnnnnnnnnnnnnnnnnnnnnnnnnnnnnnnnnnnnnnnnnnnnnnnnnnnnnnnnnnnnnnnnnnnnnnnnnnnnnnnnnnnnnnnnnnnnnnnnnnnnnnnnnnnnnnnnnnnnnnnnnnnnnnnnnnnnnnnnnnnnnnnnnnnnnnnnnnnnnnnnnnnnnnnnnnnnnnnnnnnnnnnnnnnnnnnnnnnnnnnnnnnnnnnnnnnnnnnnnnnnnnnnnnnnnnnnnnnnnnnnnnnnnnnnnnnnnnnnnnnnnnnnnnnnnnnnnnnnnnnnnnnnnnnnnnnnnnnnnnnnnnnnnnnnnnnnnnnnnnnnnnnnnnnnnnnnnnnnnnnnnnnnnnnnnnnnnnnnnnnnnnnnnnnnnnnnnnnnnnnnnnnnnnnnnnnnnnnnnnnnnnnnnnnnnnnnnnnnnnnnnnnnnnnnnnnnnnnnnnnnnnnnnnnnnnnnnnnnnnnnnnnnnnnnnnnnnnnnnnnnnnnnnnnnnnnnnnnnnnnnnnnnnnnnnnnnnnnnnnnnnnnnnnnnnnnnnnnnnnnnnnnnnnnnnnnnnnnnnnnnnnnnnnnnnnnnnnnnnnnnnnnnnnnnnnnnnnnnnnnnnnnnnnnnnnnnnnnnnnnnnnnnnnnnnnnnnnnnnnnnnnnnnnnnnnnnnnnnnnnnnnnnnnnnnnnnnnnnnnnnnnnnnnnnnnnnnnnnnnnnnnnnnnnnnnnnnnnnnnnnnnnnnnnnnnnnnnnnnnnnnnnnnnnnnnnnnnnnnnnnnnnnnnnnnnnnnnnnnnnnnnnnnnnnnnnnnnnnnnnnnnnnnnnnnnnnnnnnnnnnnnnnnnnnnnnnnnnnnnnnnnnnnnnnnnnnnnnnnnnnnnnnnnnnnnnnnnnnnnnnnnnnnnnnnnnnnnnnnnnnnnnnnnnnnnnnnnnnnnnnnnnnnnnnnnnnnnnnnnnnnnnnnnnnnnnnnnnnnnnnnnnnnnnnnnnnnnnnnnnnnnnnnnnnnnnnnnnnnnnnnnnnnnnnnnnnnnnnnnnnnnnnnnnnnnnnnnnnnnnnnnnnnnnnnnnnnnnnnnnnnnnnnnnnnnnnnnnnnnnnnnnnnnnnnnnnnnnnnnnnnnnnnnnnnnnnnnnnnnnnnnnnnnnnnnnnnnnnnnnnnnnnnnnnnnnnnnnnnnnnnnnnnnnnnnnnnnnnnnnnnnnnnnnnnnnnnnnnnnnnnnnnnnnnnnnnnnnnnnnnnnnnnnnnnnnnnnnnnnnnnnnnnnnnnnnnnnnnnnnnnnnnnnnnnnnnnnnnnnnnnnnnnnnnnnnnnnnnnnnnnnnnnnnnnnnnnnnnnnnnnnnnnnnnnnnnnnnnnnnnnnnnnnnnnnnnnnnnnnnnnnnnnnnnnnnnnnnnnnnnnnnnnnnnnnnnnnnnnnnnnnnnnnnnnnnnnnnnnnnnnnnnnnnnnnnnnnnnnnnnnnnnnnnnnnnnnnnnnnnnnnnnnnnnnnnnnnnnnnnnnnnnnnnnnnnnnnnnnnnnnnnnnnnnnnnnnnnnnnnnnnnnnnnnnnnnnnnnnnnnnnnnnnnnnnnnnnnnnnnnnnnnnnnnnnnnnnnnnnnnnnnnnnnnnnnnnnnnnnnnnnnnnnnnnnnnnnnnnnnnnnnnnnnnnnnnnnnnnnnnnnnnnnnnnnnnnnnnnnnnnnnnnnnnnnnnnnnnnnnnnnnnnnnnnnnnnnnnnnnnnnnnnnnnnnnnnnnnnnnnnnnnnnnnnnnnnnnnnnnnnnnnnnnnnnnnnnnnnnnnnnnnnnnnnnnnnnnnnnnnnnnnnnnnnnnnnnnnnnnnnnnnnnnnnnnnnnnnnnnnnnnnnnnnnnnnnnnnnnnnnnnnnnnnnnnnnnnnnnnnnnnnnnnnnnnnnnnnnnnnnnnnnnnnnnnnnnnnnnnnnnnnnnnnnnnnnnnnnnnnnnnnnnnnnnnnnnnnnnnnnnnnnnnnnnnnnnnnnnnnnnnnnnnnnnnnnnnnnnnnnnnnnnnnnnnnnnnnnnnnnnnnnnnnnnnnnnnnnnnnnnnnnnnnnnnnnnnnnnnnnnnnnnnnnnnnnnnnnnnnnnnnnnnnnnnnnnnnnnnnnnnnnnnnnnnnnnnnnnnnnnnnnnnnnnnnnnnnnnnnnnnnnnnnnnnnnnnnnnnnnnnnnnnnnnnnnnnnnnnnnnnnnnnnnnnnnnnnnnnnnnnnnnnnnnnnnnnnnnnnnnnnnnnnnnnnnnnnnnnnnnnnnnnnnnnnnnnnnnnnnnnnnnnnnnnnnnnnnnnnnnnnnnnnnnnnnnnnnnnnnnnnnnnnnnnnnnnnnnnnnnnnnnnnnnnnnnnnnnnnnnnnnnnnnnnnnnnnnnnnnnnnnnnnnnnnnnnnnnnnnnnnnnnnnnnnnnnnnnnnnnnnnnnnnnnnnnnnnnnnnnnnnnnnnnnnnnnnnnnnnnnnnnnnnnnnnnnnnnnnnnnnnnnnnnnnnnnnnnnnnnnnnnnnnnnnnnnnnnnnnnnnnnnnnnnnnnnnnnnnnnnnnnnnnnnnnnnnnnnnnnnnnnnnnnnnnnnnnnnnnnnnnnnnnnnnnnnnnnnnnnnnnnnnnnnnnnnnnnnnnnnnnnnnnnnnnnnnnnnnnnnnnnnnnnnnnnnnnnnnnnnnnnnnnnnnnnnnnnnnnnnnnnnnnnnnnnnnnnnnnnnnnnnnnnnnnnnnnnnnnnnnnnnnnnnnnnnnnnnnnnnnnnnnnnnnnnnnnnnnnnnnnnnnnnnnnnnnnnnnnnnnnnnnnnnnnnnnnnnnnnnnnnnnnnnnnnnnnnnnnnnnnnnnnnnnnnnnnnnnnnnnnnnnnnnnnnnnnnnnnnnnnnnnnnnnnnnnnnnnnnnnnnnnnnnnnnnnnnnnnnnnnnnnnnnnnnnnnnnnnnnnnnnnnnnnnnnnnnnnnnnnnnnnnnnnnnnnnnnnnnnnnnnnnnnnnnnnnnnnnnnnnnnnnnnnnnnnnnnnnnnnnnnnnnnnnnnnnnnnnnnnnnnnnnnnnnnnnnnnnnnnnnnnnnnnnnnnnnnnnnnnnnnnnnnnnnnnnnnnnnnnnnnnnnnnnnnnnnnnnnnnnnnnnnnnnnnnnnnnnnnnnnnnnnnnnnnnnnnnnnnnnnnnnnnnnnnnnnnnnnnnnnnnnnnnnnnnnnnnnnnnnnnnnnnnnnnnnnnnnnnnnnnnnnnnnnnnnnnnnnnnnnnnnnnnnnnnnnnnnnnnnnnnnnnnnnnnnnnnnnnnnnnnnnnnnnnnnnnnnnnnnnnnnnnnnnnnnnnnnnnnnnnnnnnnnnnnnnnnnnnnnnnnnnnnnnnnnnnnnnnnnnnnnnnnnnnnnnnnnnnnnnnnnnnnnnnnnnnnnnnnnnnnnnnnnnnnnnnnnnnnnnnnnnnnnnnnnnnnnnnnnnnnnnnnnnnnnnnnnnnnnnnnnnnnnnnnnnnnnnnnnnnnnnnnnnnnnnnnnnnnnnnnnnnnnnnnnnnnnnnnnnnnnnnnnnnnnnnnnnnnnnnnnnnnnnnnnnnnnnnnnnnnnnnnnnnnnnnnnnnnnnnnnnnnnnnnnnnnnnnnnnnnnnnnnnnnnnnnnnnnnnnnnnnnnnnnnnnnnntatcttaagtttatagtaggctgtatatacttctatataacgatttgggtttataaagatagtacagaggtagacaataatatcttctacatcggtatataggttatttaaggtcgcgcttattcttagggtaatatatagctatactttacctttatatcggctttatatatatagtttctagtagactagtaacaggtaatagtcggcattcgctttaagcttctatctaataactgtttcctatatttcgaaacggacttcctttctatcctttaatattagtatattaggtatcttcgtagacttctaactagtgattcctataatcagtatatcactttaggtttagttcattttactctaagtaagaataaggtaataggtaaggtcgttatacttatatatagcgatatctctataggcagtagccttattacattcttcggtagcttagttatattctattataagacgatctttctctatatagagtcgatcacattcttctataagtcgatcacattcttttataatttatctaatagcttccttagaccttccgttctctaagattaagacctagatttcgttatatatcatccggttattatcttcgactgtttagaactaattagctagcttaaggaatcgttccttactaggagttgtatatataatctcacagatagaaggagtcgaaggaccctccttagggctatcgcgtttaatactctcaattaggtcctatattttagtaggagttggggtttcagggttagtagcttcttctgtaagacaatctagtactataggttattttcccttaccgatcgcagcgatccgttatagtaggactataactagtcctattctagttagtttcgggataggtagggtgaaaccggactaggacaaatcgtaataattatccgtatagtcgtacagcttcagaagtttaggtttagggtgatacttgatattatattatataccagattccttttaacaaaagaagtgtatttctaatcgaatatcaagtatagaaaaggaaaagaaaagaaataaacgtgaaaacaataaataggcttttatacccctttaggggtaaagccctattctcgtttcccctagaaggaaggtgcgactgcctatgtaaacgactaacagtacaatcctaaacgggaaagtacgagtcccgcaagtgccaatcgtgacactaattatctaaaaggccgttaaaccaagatttaataaagactttacctttaaaaatcatatatagaggaagcgcctaccctactgtatttatacatttaattatgacggaaaaacggtggtaaggcgagtgtattttgtggcagaaaaatcttaataaattctctaactctctaaaactgacaatagtcctaaaacatgacaatctgatggacaacttagtaatcaaaacaaacaaaacaannnnnnnnnnnnnnnnnnnnnnnnnnnnnnnnnnnnnnnnnnnnnnnnnnnnnnnnnnnnnnnnnnnnnnnnnnnnnnnnnnnnnnnnnnnnnnnnnnnnnnnnnnnnnnnnnnnnnnnnnnnnnnnnnnnnnnnnnnnnnnnnnnnnnnnnnnnnnnnnnnnnnnnnnnnnnnnnnnnnnnnnnnnnnnnnnnnnnnnnnnnnnnnnnnnnnnnnnnnnnnnnnnnnnnnnnnnnnnnnnnnnnnnnnnnnnnnnnnnnnnnnnnnnnnnnnnnnnnnnnnnnnnnnnnnnnnnnnnnnnnnnnnnnnnnnnnnnnnnnnnnnnnnnnnnnnnnnnnnnnnnnnnnnnnnnnnnnnnnnnnnnnnnnnnnnnnnnnnnnnnnnnnnnnnnnnnnnnnnnnnnnnnnnnnnnnnnnnnnnnnnnnnnnnnnnnnnnnnnnnnnnnnnnnnnnnnnnnnnnnnnnnnnnnnnnnnnnnnnnnnnnnnnnnnnnnnnnnnnnnnnnnnnnnnnnnnnnnnnnnnnnnnnnnnnnnnnnnnnnnnnnnnnnnnnnnnnnnnnnnnnnnnnnnnnnnnnnnnnnnnnnnnnnnnnnnnnnnnnnnnnnnnnnnnnnnnnnnnnnnnnnnnnnnnnnnnnnnnnnnnnnnnnnnnnnnnnnnnnnnnnnnnnnnnnnnnnnnnnnnnnnnnnnnnnnnnnnnnnnnnnnnnnnnnnnnnnnnnnnnnnnnnnnnnnnnnnnnnnnnnnnnnnnnnnnnnnnnnnnnnnnnnnnnnnnnnnnnnnnnnnnnnnnnnnnnnnnnnnnnnnnnnnnnnnnnnnnnnnnnnnnnnnnnnnnnnnnnnnnnnnnnnnnnnnnnnnnnnnnnnnnnnnnnnnnnnnnnnnnnnnnnnnnnnnnnnnnnnnnnnnnnnnnnnnnnnnnnnnnnnnnnnnnnnnnnnnnnnnnnnnnnnnnnnnnnnnnnnnnnnnnnnnnnnnnnnnnnnnnnnnnnnnnnnnnnnnnnnnnnnnnnnnnnnnnnnnnnnnnnnnnnnnnnnnnnnnnnnnnnnnnnnnnnnnnnnnnnnnnnnnnnnnnnnnnnnnnnnnnnnnnnnnnnnnnnnnnnnnnnnnnnnnnnnnnnnnnnnnnnnnnnnnnnnnnnnnnnnnnnnnnnnnnnnnnnnnnnnnnnnnnnnnnnnnnnnnnnnnnnnnnnnnnnnnnnnnnnnnnnnnnnnnnnnnnnnnnnnnnnnnnnnnnnnnnnnnnnnnnnnnnnnnnnnnnnnnnnnnnnnnnnnnnnnnnnnnnnnnnnnnnnnnnnnnnnnnnnnnnnnnnnnnnnnnnnnnnnnnnnnnnnnnnnnnnnnnnnnnnnnnnnnnnnnnnnnnnnnnnnnnnnnnnnnnnnnnnnnnnnnnnnnnnnnnnnnnnnnnnnnnnnnnnnnnnnnnnnnnnnnnnnnnnnnnnnnnnnnnnnnnnnnnnnnnnnnnnnnnnnnnnnnnnnnnnnnnnnnnnnnnnnnnnnnnnnnnnnnnnnnnnnnnnnnnnnnnnnnnnnnnnnnnnnnnnnnnnnnnnnnnnnnnnnnnnnnnnnnnnnnnnnnnnnnnnnnnnnnnnnnnnnnnnnnnnnnnnnnnnnnnnnnnnnnnnnnnnnnnnnnnnnnnnnnnnnnnnnnnnnnnnnnnnnnnnnnnnnnnnnnnnnnnnnnnnnnnnnnnnnnnnnnnnnnnnnnnnnnnnnnnnnnnnnnnnnnnnnnnnnnnnnnnnnnnnnnnnnnnnnnnnnnnnnnnnnnnnnnnnnnnnnnnnnnnnnnnnnnnnnnnnnnnnnnnnnnnnnnnnnnnnnnnnnnnnnnnnnnnnnnnnnnnnnnnnnnnnnnnnnnnnnnnnnnnnnnnnnnnnnnnnnnnnnnnnnnnnnnnnnnnnnnnnnnnnnnnnnnnnnnnnnnnnnnnnnnnnnnnnnnnnnnnnnnnnnnnnnnnnnnnnnnnnnnnnnnnnnnnnnnnnnnnnnnnnnnnnnnnnnnnnnnnnnnnnnnnnnnnnnnnnnnnnnnnnnnnnnnnnnnnnnnnnnnnnnnnnnnnnnnnnnnnnnnnnnnnnnnnnnnnnnnnnnnnnnnnnnnnnnnnnnnnnnnnnnnnnnnnnnnnnnnnnnnnnnnnnnnnnnnnnnnnnnnnnnnnnnnnnnnnnnnnnnnnnnnnnnnnnnnnnnnnnnnnnnnnnnnnnnnnnnnnnnnnnnnnnnnnnnnnnnnnnnnnnnnnnnnnnnnnnnnnnnnnnnnnnnnnnnnnnnnnnnnnnnnnnnnnnnnnnnnnnnnnnnnnnnnnnnnnnnnnnnnnnnnnnnnnnnnnnnnnnnnnnnnnnnnnnnnnnnnnnnnnnnnnnnnnnnnnnnnnnnnnnnnnnnnnnnnnnnnnnnnnnnnnnnnnnnnnnnnnnnnnnnnnnnnnnnnnnnnnnnnnnnnnnnnnnnnnnnnnnnnnnnnnnnnnnnnnnnnnnnnnnnnnnnnnnnnnnnnnnnnnnnnnnnnnnnnnnnnnnnnnnnnnnnnnnnnnnnnnnnnnnnnnnnnnnnnnnnnnnnnnnnnnnnnnnnnnnnnnnnnnnnnnnnnnnnnnnnnnnnnnnnnnnnnnnnnnnnnnnnnnnnnnnnnnnnnnnnnnnnnnnnnnnnnnnnnnnnnnnnnnnnnnnnnnnnnnnnnnnnnnnnnnnnnnnnnnnnnnnnnnnnnnnnnnnnnnnnnnnnnnnnnnnnnnnnnnnnnnnnnnnnnnnnnnnnnnnnnnnnnnnnnnnnnnnnnnnnnnnnnnnnnnnnnnnnnnnnnnnnnnnnnnnnnnnnnnnnnnnnnnnnnnnnnnnnnnnnnnnnnnnnnnnnnnnnnnnnnnnnnnnnnnnnnnnnnnnnnnnnnnnnnnnnnnnnnnnnnnnnnnnnnnnnnnnnnnnnnnnnnnnnnnnnnnnnnnnnnnnnnnnnnnnnnnnnnnnnnnnnnnnnnnnnnnnnnnnnnnnnnnnnnnnnnnnnnnnnnnnnnnnnnnnnnnnnnnnnnnnnnnnnnnnnnnnnnnnnnnnnnnnnnnnnnnnnnnnnnnnnnnnnnnnnnnnnnnnnnnnnnnnnnnnnnnnnnnnnnnnnnnnnnnnnnnnnnnnnnnnnnnnnnnnnnnnnnnnnnnnnnnnnnnnnnnnnnnnnnnnnnnnnnnnnnnnnnnnnnnnnnnnnnnnnnnnnnnnnnnnnnnnnnnnnnnnnnnnnnnnnnnnnnnnnnnnnnnnnnnnnnnnnnnnnnnnnnnnnnnnnnnnnnnnnnnnnnnnnnnnnnnnnnnnnnnnnnnnnnnnnnnnnnnnnnnnnnnnnnnnnnnnnnnnnnnnnnnnnnnnnnnnnnnnnnnnnnnnnnnnnnnnnnnnnnnnnnnnnnnnnnnnnnnnnnnnnnnnnnnnnnnnnnnnnnnnnnnnnnnnnnnnnnnnnnnnnnnnnnnnnnnnnnnnnnnnnnnnnnnnnnnnnnnnnnnnnnnnnnnnnnnnnnnnnnnnnnnnnnnnnnnnnnnnnnnnnnnnnnnnnnnnnnnnnnnnnnnnnnnnnnnnnnnnnnnnnnnnnnnnnnnnnnnnnnnnnnnnnnnnnnnnnnnnnnnnnnnnnnnnnnnnnnnnnnnnnnnnnnnnnnnnnnnnnnnnnnnnnnnnnnnnnnnnnnnnnnnnnnnnnnnnnnnnnnnnnnnnnnnnnnnnnnnnnnnnnnnnnnnnnnnnnnnnnnnnnnnnnnnnnnnnnnnnnnnnnnnnnnnnnnnnnnnnnnnnnnnnnnnnnnnnnnnnnnnnnnnnnnnnnnnnnnnnnnnnnnnnnnnnnnnnnnnnnnnnnnnnnnnnnnnnnnnnnnnnnnnnnnnnnnnnnnnnnnnnnnnnnnnnnnnnnnnnnnnnnnnnnnnnnnnnnnnnnnnnnnnnnnnnnnnnnnnnnnnnnnnnnnnnnnnnnnnnnnnnnnnnnnnnnnnnnnnnnnnnnnnnnnnnnnnnnnnnnnnnnnnnnnnnnnnnnnnnnnnnnnnnnnnnnnnnnnnnnnnnnnnnnnnnnnnnnnnnnnnnnnnnnnnnnnnnnnnnnnnnnnnnnnnnnnnnnnnnnnnnnnnnnnnnnnnnnnnnnnnnnnnnnnnnnnnnnnnnnnnnnnnnnnnnnnnnnnnnnnnnnnnnnnnnnnnnnnnnnnnnnnnnnnnnnnnnnnnnnnnnnnnnnnnnnnnnnnnnnnnnnnnnnnnnnnnnnnnnnnnnnnnnnnnnnnnnnnnnnnnnnnnnnnnnnnnnnnnnnnnnnnnnnnnnnnnnnnnnnnnnnnnnnnnnnnnnnnnnnnnnnnnnnnnnnnnnnnnnnnnnnnnnnnnnnnnnnnnnnnnnnnnnnnnnnnnnnnnnnnnnnnnnnnnnnnnnnnnnnnnnnnnnnnnnnnnnnnnnnnnnnnnnnnnnnnnnnnnnnnnnnnnnnnnnnnnnnnnnnnnnnnnnnnnnnnnnnnnnnnnnnnnnnnnnnnnnnnnnnnnnnnnnnnnnnnnnnnnnnnnnnnnnnnnnnnnnnnnnnnnnnnnnnnnnnnnnnnnnnnnnnnnnnnnnnnnnnnnnnnnnnnnnnnnnnnnnnnnnnnnnnnnnnnnnnnnnnnnnnnnnnnnnnnnnnnnnnnnnnnnnnnnnnnnnnnnnnnnnnnnnnnnnnnnnnnnnnnnnnnnnnnnnnnnnnnnnnnnnnnnnnnnnnnnnnnnnnnnnnnnnnnnnnnnnnnnnnnnnnnnnnnnnnnnnnnnnnnnnnnnnnnnnnnnnnnnnnnnnnnnnnnnnnnnnnnnnnnnnnnnnnnnnnnnnnnnnnnnnnnnnnnnnnnnnnnnnnnnnnnnnnnnnnnnnnnnnnnnnnnnnnnnnnnnnnnnnnnnnnnnnnnnnnnnnnnnnnnnnnnnnnnnnnnnnnnnnnnnnnnnnnnnnnnnnnnnnnnnnnnnnnnnnnnnnnnnnnnnnnnnnnnnnnnnnnnnnnnnnnnnnnnnnnnnnnnnnnnnnnnnnnnnnnnnnnnnnnnnnnnnnnnnnnnnnnnnnnnnnnnnnnnnnnnnnnnnnnnnnnnnnnnnnnnnnnnnnnnnnnnnnnnnnnnnnnnnnnnnnnnnnnnnnnnnnnnnnnnnnnnnnnnnnnnnnnnnnnnnnnnnnnnnnnnnnnnnnnnnnnnnnnnnnnnnnnnnnnnnnnnnnnnnnnnnnnnnnnnnnnnnnnnnnnnnnnnnnnnnnnnnnnnnnnnnnnnnnnnnnnnnnnnnnnnnnnnnnnnnnnnnnnnnnnnnnnnnnnnnnnnnnnnnnnnnnnnnnnnnnnnnnnnnnnnnnnnnnnnnnnnnnnnnnnnnnnnnnnnnnnnnnnnnnnnnnnnnnnnnnnnnnnnnnnnnnnnnnnnnnnnnnnnnnnnnnnnnnnnnnnnnnnnnnnnnnnnnnnnnnnnnnnnnnnnnnnnnnnnnnnnnnnnnnnnnnnnnnnnnnnnnnnnnnnnnnnnnnnnnnnnnnnnnnnnnnnnnnnnnnnnnnnnnnnnnnnnnnnnnnnnnnnnnnnnnnnnnnnnnnnnnnnnnnnnnnnnnnnnnnnnnnnnnnnnnnnnnnnnnnnnnnnnnnnnnnnnnnnnnnnnnnnnnnnnnnnnnnnnnnnnnnnnnnnnnnnnnnnnnnnnnnnnnnnnnnnnnnnnnnnnnnnnnnnnnnnnnnnnnnnnnnnnnnnnnnnnnnnnnnnnnnnnnnnnnnnnnnnnnnnnnnnnnnnnnnnnnnnnnnnnnnnnnnnnnnnnnnnnnnnnnnnnnnnnnnnnnnnnnnnnnnnnnnnnnnnnnnnnnnnnnnnnnnnnnnnnnnnnnnnnnnnnnnnnnnnnnnnnnnnnnnnnnnnnnnnnnnnnnnnnnnnnnnnnnnnnnnnnnnnnnnnnnnnnnnnnnnnnnnnnnnnnnnnnnnnnnnnnnnnnnnnnnnnnnnnnnnnnnnnnnnnnnnnnnnnnnnnnnnnnnnnnnnnnnnnnnnnnnnnnnnnnnnnnnnnnnnnnnnnnnnnnnnnnnnnnnnnnnnnnnnnnnnnnnnnnnnnnnnnnnnnnnnnnnnnnnnnnnnnnnnnnnnnnnnnnnnnnnnnnnnnnnnnnnnnnnnnnnnnnnnnnnnnnnnnnnnnnnnnnnnnnnnnnnnnnnnnnnnnnnnnnnnnnnnnnnnnnnnnnnnnnnnnnnnnnnnnnnnnnnnnnnnnnnnnnnnnnnnnnnnnnnnnnnnnnnnnnnnnnnnnnnnnnnnnnnnnnnnnnnnnnnnnnnnnnnnnnnnnnnnnnnnnnnnnnnnnnnnnnnnnnnnnnnnnnnnnnnnnnnnnnnnnnnnnnnnnnnnnnnnnnnnnnnnnnnnnnnnnnnnnnnnnnnnnnnnnnnnnnnnnnnnnnnnnnnnnnnnnnnnnnnnnnnnnnnnnnnnnnnnnnnnnnnnnnnnnnnnnnnnnnnnnnnnnnnnnnnnnnnnnnnnnnnnnnnnnnnnnnnnnnnnnnnnnnnnnnnnnnnnnnnnnnnnnnntagatttataataggattaactataatagtaaaggttataataagaagtaaatactacggttagagatcacttttataacctagaaatcgtaagtaggtaactataattaaatatataaacttagtaagataggccctccctctatatattatttttaaaggtaaggtcttccttaaattatagtttaaaggccttcctagtaactagtactttaaagttagtctaaataagtagatattagataaaataagcctttattagctataaaagctctttattctaactacttcttcttatataaagggagtatatcgacttttagtacttaatagctatagaagctatttaaccctaaaattcgataagatttataagaaaaataagattataccaatttatatactactacatttatcttaccttttataatcccttaatatcagttattttacagtagtaaaacggtcgtatagccggttagttaagataaaaatatagactaggattaactatattaataaacttaagttcctagaagtatacccctctatataaattaaagctttgaaattagagacaattaaaaatagcttcttagcagctagtttaataccttttttacctaatcaggtactttcaaaacttaatatttatctttgaatactaaccccccctcctagtagggatagcgatttaagctagaattttaccctaaaaaccccttttaatagcaaagatctacatcgataggcttcgttaatcaaagctttacttcgtacctaatctcgaagcctaataagcccttctaagtgtacattagatcaacttgtcaaaggctgccagattgcaatatatagtgctattctactagcaaaagaaaacaaggatttacaggatgaaaataagaataagaagcaaaagcgggccagatctagacggcagatacctaccgaagaaggcctctcagttcaagaagcttctgaaataattgctggactggtagaagcatcagaaatacccctacaccccccggacggaagcacttaatcagggttggaaccacgaccacgggctgcaccaaggtgtagtgggtgtggaaagatagggcataagatcaataggtgttcagataaatgatcctttttagtttaattaatttaatggcgttttggttgaaatatattccttagaaaactatactcttgggtagggtggcggctcgcttacagtggcggctcgcttaccgattacgttactccggattaattgcttagataataccatagttaagccttggaagctcccgagtctggagaagtctccctaattaggcctagtcccaacttatactcgctaattctgctaattctattggcttgattcttataccgtcttttagaattctgccggtctaagtatgattacataatgcaaaatgaagccttacgtaaccaacaatgccaagacttagttacaaggcttgtagcttcttcgactgtccaatgtagatcccgctgtcatgacgacatatactaaacttcagtgttatacatagcattatgattgaacttattggtagaaaatagagcattccaatcaaactaaggcactatacacgcaagccaacgcgttccaggaacgagcgaagtcaataaatcttagaatcctgcttagggttggtgacagcatcacgtgcagagcctccgaggccatgacgtcttcctcgaacctgaaaaacttccccataagaccacctcgtctcttaatcctcccgagcttcaattgcttcccctctttggtccaaagaatctctattgctttagtctttctgtgtttgttgcttgtttactacagaattgctgcttctcgcatttgtttaccttcacccctcagctgtctttctgaagctctcaacaccccgccccttcgattaatccagaaactcgattttataagtgtcgctgattgacaacacacagcacaatgactctctactactcccttgtaagcctgacaagttccttctctagttgcttcttgttgtgtttctcaagaagttctcgagaatcgttgcagcctgatgcccgaaactgtctacccagcccaagcgtctccaccctatcgatgaactaacacaatgccctcatataggtattcctccttctggtgttcgagatgggtgtattcctggccctcgtcatccctctccctcatgtcgttaagcgcaagctgtttgccttcatctcggagagcccgatcatagccaaattacaatatggattgaaggtatattgccaatttgaaaccacgtttccggttacactgctaaactggcctccagattacattcatcttcatcctcattctgttcatcgactccgtgaaccgtgtgtaccgtgtgcagcaggagctgtccgccttcgccaaggacggtcccggcatggggtaagtaatcaatcctcaggcattctagcaaaatttctaaccattgttaccaacagagccgcccacctcggtaccgaccgcatggaggtccaggcccgcaagttctactcgcagcgcaacatgtatctctgtggattcactctgttcctctccctgatcctcaaccgcacctataccatgattctcgagactctccgtcttgaggaccgcgtccgtctcatcgagggcgacaagaaggccggtggaaaggactcagcccgtattgcggaagctggttcagtcggcgagatcggtcgtcttaaggagatcattgccaccaaggaccgggatattgagactctcaagaagcagtgtgagggtctgacccgcgagtaccacagcctgggtgaccagatttccaacgaaaagggtgataagaacgagaaggttaagaaagacctgtaaaagggttgcattgttcgattccaccggacccagactgtcgaagcccaagctttgatagactttcactcgcgcacctttacgtttgcgttggattgagggtctcattccctgtcaagggagttggaaccctctctgcaacaaaatcacttgatacattatggattaagtattgtgcgtaactaccctttctcgatgtatggactctactattatgtagagggagatgtgggaattgcaattggttcctatcgctgtattcctttccatgtactagcaaatatcttctaaggtttttcggtgggatccatagtgctgattctgtagcacttgtcatattcaatcaatattaccctttcatattcaattgtctattgatccccgtcatagccgcgagtgtccagtgcatcaaaagctaaggaccagaccaagaattgtcatgtctagagatcgtaaattacatagtatgtataagaaccagccgatcacggctgtggcatatagaaatatcaaaccaggaaggtccaaaagctcggatataccagctcctcttcaaagatccttcggacctgcgcgagcacaaaccgctcaaccttcccaacattcttcaatacctgcttcccatcttccttgcgaccaatctcactatccacccggatctcctgcaacaacccaccctgccgcttcagatccttctccttttgatcgcccccagaccgaggccgaccatcatcactgggattttgactactctgagactgttcagatccaagcagggcatctgcgtcttcaggagaaagaaaacagaaatgtacccgcttgcggatatacgcaacaacggcaacaccgtcaaacgtgatgcctgtgacattcaacttcaacggcagacccacaaagctgggcatcgggtagtcaagcaggatctccgcggtcagagacatgcgcacgtcgccagcatacttagcatggcacagcacctggaagtcctccgggcggcgctcgcgcatgcgcggcgggatggggaacgattgatgctcggcggccgggtcgtctgatatctctattgagggttgcggcgcgtcggttgggtcgcttgtatgcggatttgacccactgctgccggtgtggccaagggagggatgggatgagagtgtatttgcggttaagggacgggagccggaattggtggtgcccaggtctggctctgcgaggtgatgtgtaccagcagggcgggctgcttgggacctgggtccggcacccatacctgagtctgaccatccgctcgcaaatggagtgccgcctgctacggcagcaaggggtgtctggtttcctgatagaccgcctagagaccgcatgtggtatcccaatgttgacgtaccgccgggaatcccaggtgtactggcgcgcggcatgaaatgcggattaaggtgatcgcctagtggggatcgaagcgcggatggctggaagccttcgccagggtatggatggtgactgaaattatgaaggctgtgcgcggtgggattgaaggtcatgtcgtcttcgtatggggattcgtggagctcggacatgagctcctctgaggtggaggtgtcggcatcgtcatcgtcttcctcgtagaaatctgcgaacggttcgcaaaagtctttgatctcgagatctggcgcgatggtcccgaaatcgaaggagtgaacctgaaccgagcgaataaagcgcggtagggtgatctcctggaacttttcgtgtacgaacgaccggattcgctctgctagggcttccccgtccgggccggaggtggcagctgcccagtcgacttcgattgacatcacatatgcaatgctatagcacttgatgcttgtacatatcaggggagatggaggacctcgggagcccgtgacggtatcaccacgtgatatacggagtacatgatgacattccggccagttccatcgataccaactacatccgaagcagtgattgacgaagtgctaggaaatataatatattcactgtgcgctcactaattactacctaagagggttaatatccatcctcctctctggatacactcataccaataacttcaaaacattctcccatccaccgtagagccggatgtaagcacatttcattcacaaatcatatgcagacgctttccatcctttccgtcctttccatcctttccatccgataattctgtctgatccgattttctcttcatgggtcgggactgttttgataatggccggggatctaacttagacttgtgaaagtcaatgatcaatactcggttaagttcagggttccaaaggatattgggatcccgaagatccccgtgagtaaccctcagcttgcggatttcctttttcgaccggtgaatctcccggcgaagcgacgaggtcatttccatatgcactatgttctcacctccccagcccataatgagcatgtgagaaatgtctcccgcatcatggtagtagtccaccaacaggtcgatagtaccgaggaaaacgggtactgcggacccttggactttgcgaagaatctggtaaatttctgcttcccgggagacttccttccaaagtcccgaagttgttccttttccaacgaccgtatagccataggcggtacatgtaagtttgaatggcgcaccatatgacccacatgttccgaaaggcgtacagtctttgtcacggttctcgcctagttggattttcaataaacgcactagatctcctgcattgataggatgtttaaggtcatttggactttgtcgatgaagtgacacgtttgggcaatgctcgtctaaagtaccgccagtctgtagcccgagtaaacaccgctgagtgcaaaattgcgcatcgtggcgatatgactggcctcttcggtcgtttctaggctcttgccgagtagacggggaggatgtgacttgactgatgcggcgctttcgtctttcttggttcgtatcggaacctgatgagtttggcgactccgcacggtgtcggtcatccgttggtgcacacccggcagattgagggcctgtagacgacgaccgacgaccttcttccgtaggggcattagattgaggagaggaaccagattgaggcgacgggtgatagtcggtactggagtccggatccgtaacctcagagtggaaactactttcacaggatcgagagatttgctgtaattcttccttgggaatctcagaaagagtatggtcgaagttggttttccaagtacggagcaccgaccgcgcattagatttccatatctgatcacgcacaggggaccggaatgccatcagacaaagacatagtacatgggcaattgaggtattcggatattgaaaattcggttcgctttttctgttaggatcacagaaaaagtagtacaatgtactagggttgtcgtatggaacgcggagaaggacacgcgcaatcccgttcatcacataggaatattcgagtcctttctgaatcatcacatggtattcctggacaatagcggagcaggcgagtcgctcagcattgtacctagcctttccatcgacgtcgttagggattgtgttagtatagactattttctcccataagttcattggtcgaagccctaaacgaagagtttccaccgaaagcttatgggggggtttatattcaaccgtcgtgaggatgctttgggtgtttccatcaatacgacggatccaaaacttatcgggtattggattgggtatgctcgagggctgacttgtatccgccctaacagcttcggcgttcaaagcatttatatgagagctgaactcgattccatcaccaagcccgaactcctctcgagcaagaggaagtttgctcaataccgtgattatatcattgactggatattccacagcgtactgctcgtaattctctatgcccttctcgctatcgatcggcttgctagtaaggcgactttgatatccttcaatctggttcagagaagggaaggcccgcagcgaatcctccgattgtaggtacccacacacagcggagtagagcgcttgctgttgagctggacaatcaacccacaattcgagtcgtgtcgggcaaaactttccagtgggggcgggtatttgacctgtggtcgatacggatagttccccgactctcaatggaagggagagtagggagtggcaagagcgcaggagttccatgaaagtggtcggtcgagtgcgctctttttcctttcttgcctcctcttctgcctgtagagtgcgctcttctgcctgtcgaatgcgctcttttccctttcttgcgtcctcgtctgcctttcttattttctcctcgagctctaggatgcgagaattgacatccgaaaagctattgctggccatcgtttagcccaagggatattaaaaatagctaacagctttgaaggttgctgggaaaataggttgctggaaggaaagggctggggatatgttagaacacggctcccggcaaaggtatatttccgactcagccaaccagctcggtggttgcctagatggcgttttcactcggcagaaaattgagcaaaaagacaccttagaaatacggctttagcaacgttcaggaagggatatgaagctggataatataaacaattgaggggtaaatggagaggcggtgaattacgccatgacccacagtttgaggctctgtacggcaggttttttgggtccatcgcgccaacctatacaagcccttagaagcataagattatttctgatctttctatcggtctttctatctgtttttttgaggtcttttttgatgtcttttagaatgcagccgctaaccaatagtaggggacctttgtgtcagatcaatctgaagaagagctatataagaaggctgcttcccactcttgcacttacttcttctttccttcttcatcttatctgacggttgtatggtttgttcagtcaaaccatgcatatgaggattttactcgcttgtcatttatggaaggaatgattccttccacatacggcaagagagtcacacactctgccctattggagtcagtgaggaccaaacagagatgcaaattgcgtttcattagctgcctcccagggggtgaacctataccaggatctaacgtaccgacctcgtgagacccgcagttgggatgtttgcgctgtacaagatggaacctctcccgaaggtggtacagcatggtgacgaaaatcccggaaagctatggtctacaccacctggtcgacaagaccattgagagacccgatcgtgacgccgcaaacgcagaaacttgaatgaaattaagtatgcaagtaaacacctgcttgcgactctgcatcgaccctaagatctttgtcgctggttgcatagctgttcggacgtgacctcctggtctgctcccaacatcacttttccggatatgttttcacggtgaagaccgacaataagtataaacggccactactttctaaggaacctttggaactgaggtggcacctgtctcgcattgcttgtatgcagggcagatgcgagaacgaagatccctggtggttagccatctcgtcatattattgctgcacatttgttcagttatatacacggacaagcaacaatggatgctatttttagaaaaggaagtgacatattttcttcttgccactagaaagtttcgcccgacgcgactcgaattgtggttgattgtccagctcaacagcatgctctactccgctgtgtgtgggtacctacaatcggaggattcgctgcgggccttctcttctctgagccagacagaaggatatcagcaacgccttactagctagccgatcgatagtgagaacggcatagagcattacgagccttaagctactactcggtaagtatcaagacaaagcggacttatcgacaatttgtgcaagcttgtggatcattgagggtcaagagactgttccatagcctatggatttctacaaaaatatatatatttcccttttgcttgatattgctgtgttatattggatattggaattacatacatcggccactataccagccattgagataaaattgtgtggcaatacaaaaagattttcataaaaccaggacagcatgatatactgcatatcaaaacacagctttgtggtctctcaatttgtccacaagatggtattgtctaaggagaggaagatccgagaacgcgtagatagacatatcaacacagagaaccaccggcaaacaatgacagaaaggacataaaaagtcaaacgacagcccgaaattccagaatgaccgatgtgaggcaacaaatgagatagcctccaaatagtagatgtgacacagtgatatcttcttcttccctgaagcagacatagacagggcggggaagccaatcactcgatgacagtctagaacatagcaacagacggcctcgagtctccgagtcatttggtatctatagtatctcgtcagtcaaacttcttgctggcaacagccgtctcaaaatatggaaggtgcaactcacgtcagaagccaatttaaccaccgtgacgagggcaattggagtttactcgtgtacgagtctgttccttgacacctggacagccaggagtgccttgatgggcacatgggactatgccatcttcttggtgcgtgcacccgcaggcgtactgaaagatgtagatggaacacatattgagggttgagtgaagaggtgaagttgtagaggatatataagcagatattgtgaattgaagaccacttagtttgaatgaggccttgaacttttgatattggttgatgtgatgagaagcaattagaggatcaaagcccggctttatagtattcgatggctacctcaagcgaagtgaatggcctgcgcaactcaatagagaaaagaagctaggaaattatcgacagtcgcaaaaatggttcggtccttcagtcaccttgcacaagcgctgtaactcattcaactagatgcgccatatgcagccagtgactcaatgatcacttgttgcgcagtcaaagagaaggtgacggtaggcacggaaatagtatacacatgcgccatatccagggcgtatacatttaccaacagaaagtagagtttgtggtaggtggaccgttagagtgtggcgtaccattggggagagtcaagatattcgatggggttcgctagtagcagcaaaccctaagcatgactaccgatgcaaattctaaatcccgcaggctgcaagaagcacttgacatcactctaaaagcgctgcagccagtgttagggcgtatgttctgagcgccaacagggacccctctcccgatggcaccccatagggcaatgctgcggttgaagcgttgatcaggaacatggtttgccccatctaagaaacctctatgatcctgatgtctaaccttaaagccatcgctcatactccgagaaaggcaactgccacagcttttttatgagcctcaccgtaggcggcgcaggaggtgtgaccaattggatgatacctgtgagattacagtgactcttctcgaattctgtatacttggatattcaatataaccccgggaacccgagtacccgcatagggctctagacacctacgttgttgcaatggactagataggtaggtcctgggagtaatcatcgagagccaacgaaatttaaagaaagcagtcctccaagcaaaactctaccagttcagtctcgatatggcaggagatgacttcattgactctattgcaatgggcttcgacttgtggatataggcgaataaggctcatctctatggcgcagttggtgattaccgcaagttctgcgcgattacaatgcgaaagactgcatggtgacaaggctttttcttaataataatgagttcagcgagtaaaggataagaacaattccagccaagaaaatccggacttgctatggttagtatggccggtgttgccggggtgcgatatcagccaagaggcattctttgtcgaatctagcgcgatcgtgctgtggggcctaggcaaaaataaaccaatactggcctatcagttgattctagagcgctaaagactggcgagaagcaccaagttcctcagccaaggcacagtagcattcatatgggttcgactgaggctctccccttgctgaggcaccgacccaccggaagatttactccgagcgagtagagacgcgcggggctagtggcggcaaggcacagcgcgcaatcgataggtcgagagcagttgctgagcagtctgctttgccgctgttggtttgtaacttttaggcattgcagagagcggagaaaagtaagaacggaaaattacttcaaaggttaatgtttgcattttactgcatgagggttttaccacgtgaggagtgtttccaaggttcagattcaaggttaaataaacatgggggaggaaccatggaaatgaaaaatctaatctgtttcttatctgtttgaaatactagcctaggagatccgcttgaaacaatttgcttctcacatggagtaagtgatatccccgagtgacgactactcgaatctagactgttgacgatatctcgactcgattcttggaacattggaatatgatgtcacatttgtgtctttcttcctgcaaagagtagcgaaattatcgctatcagggcccctaagagaaaagaccggggagatcaaaataccccagcatagccggtggcccaagcgcccatgcagcggttggaatgattggcgaagaggattatcgacgagataattcggaatgcgtaaggatttccacccgagaccattattaacaacacatacaggataggtgtggaggcatacgggagcctgtggaagccatgagttttcgtgtgtcggccccacatcctggctgttgatcttccgaggtccttgagtttcggctggcaacggcatatcgcgcgatgacgcttatacatattcgccatggctgctgggaatgactgtcagccgcccagactctggtgcgactatgccagagccaagagaggcgaggtcgaagcattcagagaaagaaaaggtcaatagtgaactcttggctttgatccccccttttttcggccaagacatgtgaatctccccagcatatttgggattctcctttctgggcttaaacggacgataatggcggggacctcgtatccactcctccgtacatatgatgtgctggatgcgttggatcggcattggatcggcgtgattcgggcttatcattgatacagcatgcccctcattctctacggtcctccctcttggcttatctcagtctggactatataagctaggtcgaaactccctgagatttcccactttcatccaaaacaatccatctaaaactctccttcaatcccgaaatatcccgtcttttaaccgatctacttcttccgcacaaatccttcaaaagttttctcagaatgtacacttacactgccactcaccgtttcttggtcctctccgccactgagtctggcccttactaccccgccaacaagttcctcgtcttgtctcccatcgaatgtggcccggatccccgcgtctgggaagaccagccccaaattgagaccagctcgaacgaggaggacactgtgccggctcctgccaaccgtgcccgcaccaatagctctgtctctaccgactcttcagtctccctcgatgacactgctgccctttcgcccggtttcctctaccttggccatggcaagaagcagcactaggtactctctatcattggccggcctagtggtttggtctcctttttcaatcctatttcgggatatttcaccgtcacagcaactgatccataattgagcttaccatgtgttttcttgttttcttctttcttttgcaatcttgatcaaattgagcgactccaatcgggagctttgggaccaccctatcatgggatagggcaggaaaatcaataggggtgttttttttttcgtggcgctttcaaattgccatatgcttttcattcagaatttgtctacactctcacgtctttcgcctctgggaagcatctgtattgccccattcggccagctagcaatcaatgaacaacagttcaaaccatccgcgtgattcttttccaccccacttttgccgccaaattgtgcacactagttacatagcccacctgactaaaatacaaggttgtacggaatagaggaatccccgtcctgtcggacgctagggagacccctaaatgcttgccaagtgctgccaagatgatgatttcccgccaagccttgtgcaatctgatactcccgccttggctggggtagggattgacggggtcaccgcggacaatgttccacggccaggcaacagtgcccattatatgtcgtggaagtgtatatgggctgcgaatcctgccaagcctccctgtcttactacgatagcttaccagtccacaattattttgttttcttttattgatccctccttgcacgttgattgtttcatggattagattggcttgttcgagttaagaccattcttggcccacaattgccagctcgattttctagtcttcattctttccggtaagacggtctgctcttcccccctttacccctcatcaacttattatttacttccccgcacatttctcattccccaggaagaatgcgggcctacaacatacgatgcactatttagcctactactatatagtttcggttcgaaatttcaagtccccgtgaccaataagacccactaatttcaaccacatgacaggtgttacgcgagatggactgtaaaaaggagaattagccgagtggcttttcaagattcgagttggctagaattaggtacctgtctaggtactcagggcttgggctagcactaaggttctcacgggtcaattgctaatatccctggttctgtgagtaatagatctgtgttactgtgctttacttttagtacccgtttccccccctctagatgctttgtttgcgagcctcgtggggactgcacgtactttattttgaatttgcttaggaaatgtccgatattatccatttatcttatatacattttcagaccgccgactcttaggaaaggggcaatgattgtgttcctccgtctgaggtatttcaagatatagctcgaggactgtatacaacattgtttatctgcttacgcttctaaaattaagagcaacttcccaatgaaagtctgaaattttcattcaattcatgatagtgacatcgtcctcgcagatcaaccgcataggatgcttcggggacttggcccttaatctcatcttaatcgcaacgccctcgttatgagtttgatattcaccgacgttcaagcctcggatgagacacattcttaacctcttcctccagatgatgcttccacttgtcatttcactacaaatatttccacagacaaagcccccgcgaacgggaacagggacgggatccaaaccataccacacatgaatattgatctatcaccgcaatcttcagtaaacttcgcgctgtttggagacctagttgcgcaccaaatatataatatgaatcttgctagctgcgagttccaaaattcggcgcatcaaaagagacttcgcattgccaaccacgagagtttcgtcttctggatactgtaagtaggaaagcgcaggagaatataaattttctataccgacgaccattgcaattacgagttccctacgtacccccacgacatcggggttgtcctcgatgtgcacgtacgccacatcggaaggtatcagactcccgtgaaagtctagagcagggattacgaccatttgaacgatgcgaacagctcagtggactctataccatccgaatgtgcgtccagcacccaacctgccctaccacgatgatatcaaacttgaagaagacggtagtcgaagaatacataatgataaaagttgcgacgcgcgacccgaggcgtcgaaactaattggtctggtatagccaaagagtgagaatgtaggggatgataatgaaatatattctttacaatatagctagctgctccgtacacaaggtacttcagggtcaactaacgatgacggtaatagatacctccctcgcagccggttcccatatataagacttgccattaattagttatttttccattcctaaatggtcttcccaaagtcctccaaggtgataatagcactagttaaatacctggaattcaaatgcgtaagatgtaagttggcgataaatgtaaattccctgggcttgaatacaacttcggatcaatattaatatcgctctagaatatgtcactacagagtttctgtaagagtcatgtcactgtagtgcccatttagagtcatctcataatcttaggacgactcatttttcatgaggaaactgcccatgacccatactcattcataaagctctaattttgtagcaaaacgaaaactatccgtatgattcctatgcactggcaatgccatcatataatcctgctttaaatctttcgattatgtataccatacttgtaaaaaggtggccagcagtcattagtccgctgagacactatagggtcgagaaatcaaatgaccccattttatccgagtctgcatacataaaggacacacattaagacttgatgcttctctgtgcagtaactggaatttagggttgactaaatagtatttgtcggcgtttaggcaaacttcgtatatctgacttgatgttattctcgcaatattgaatgaacgtggagaactgatatatctcgctatatagatcaatctgtatatttaagttgtatgttacacgtcgttgatccaatactactctcaattatcccgtgtcgtgcattttgaaagtgacatgctatttttggctaccgtctctggtgggaacagccaagacaagcggagcaatggatattgaaagattatatcagcctgaatcagactgcagatctagaactataaagtacgacgctgtaatcatgactcaataaaagtggtgcagcgatattataatgcataataccggccagtttttggcctattatgattcctagggttatctagtgagagctgagtacagggaatgagccttgatgcctgtagggtaaaggggacaccatccgccttcgatgtgcgcagcgagtagagtagagacgatgttgttacacttgcaccgtaccgttgtgagacgaatcctacgatatacacctaaaatatcaacgaattacaacataattattggttcagaaatgcggactacaccgacacatacatgaaacacaggagcgatgcttttgggaaggatctcctttttgggtatccgtatataggcggtatagattggctcaactgcgaaatgtctcacttttaattactttggggttgggggtatattactgtacagctcgttctaccccaatacattgtaaataaggaaacaggttgggcttgtgaagtcatcgggaaatgatgatacataatggcctgatccggcaatgttgattactacgcggggtggcgacgaagcccgaaataaacccgaatgaacagaaacggaccttcaattgttagttttagctcaaagtaagaaatgacttagcttctacggggtagttttacccatgttctttatatgtatgttgtacaaagtactaacgggcgatgccgagcctcggaagttcagaatgtttcatcgtgcccggagtacgcgggttttccgctaatatattacttagttagttatgttaccgaggtacgtatttaatgataattaaggtacggagtactccgtatgttgtatggagtattattgttagcctatttctttgagtgtcttttgagggcgctaaggaatggaagctgcccaactgcttctgccgcgtttctagcgccaaagccaagaccccgttgtgttccgactgaatcgccggtcatttaacttatagtttccaagccactactatttccaataaagagatcatagaatggggtaccttaaaatatatactagagtgctatattgttgtagcaacaccagcccccggttattgacacctgctccttcaaggctatgtaatgacgaagtgttaactccgccagatctcttatctgagattgccccttgcagatgaccccggatttagcgtactagtatctgagtttctttggcgcatctatctctcgctttacatctatgttatatagatctaactcacggtcacggtccccagcgaatataggtaggaagtggagaacgtttcttcacaatgaaccagaaaatgactcaataattggcaggaggaagtgttactagctgctccacttacggcggtggtcgggaggacataaaataataatgaatatcattccccgtcggagtacggagtaaacaggtgtccattcgatgtaagtgcgttgctcaacataactcaacaaagtcaacagtattcgactacgctacttatcagagcagatattattcccgttggtccgcaaagttaatatcaccatcatcgactcggccagttagggccagttgcccaggtagtccccgagccaattaaaccacattagtcataagatacagtacactagcccgtttcaggtaatttggtacattaccgatcatcacgctcgcatcctgcaagcggtgtgcacatttgctatatacgctttcaggtagtctagttgttgtttctcgataatttgaccatggtagcccaagatctgtgaattaatccatcaagtgatatagtatgatactatagagagatcattattcggggccagctcggggccaagatccgctaaggaaaccggtcacgtgggtaaataccgtaacagcgcttgtccaaaaccggaagcgttgccatctcataccccgtcttcatgagcccttgcccctgctgttcctcgacttatcactcttcgattgcagtattattctcacttattcaaccctttccctaagtcttcggattattattagaaaaagaagcaaagggacctacactccttcaagtgactcgacgactttctgccaaagcgggacatcatccgagggtggactcctgcgcccaaaaaccgccatccactcaaaactgtcgaggggcaccgactgtttcaaagtcgcattcttattctcttcggattttatctgtgtgagcttcgcgcttcaacgcgggactcgaagaaaccctgttatctataagcctctcggatttggcgtcacatcgcgcaagaccggacagggaactaggatatcgagtcgtcaaacctcgacttggaattcttatttttactactcaaaatttggtatcagcagtttgccacgatgactggtgccatgcctattgatatttcctcccggcaaacgacctcggtgtcgccgccgggtcaacaggcgtccaatctgacttcggcgttgcaaagagcgggcaacggcgagcggacagggagcttttcacatcttcccggcggaggactcggcgtgttcaaggccccaccgcctcgcaaggaatcgatcggcgcaaccacaacacaatgggggaacgggacgaaacctatctcgatgtcgggatctgctcgcgacaaaggtcgccgtgagtcgctcgcagggagcttggtgggtgggatgagctggggtggtgtatccgttggtagttggatacgtgatgagtgagtggcctgtccggacctagaagccgcgggggaaatgcccaccctgtgttgctattgtcgcactgcatcaagagctgaccaagggaaatccccgcagtatcataatgactggcacgtcaccatttaccttccagtcgccatctttccattcctcatcgtatctcccgaagctggaagcgaattttatgcgagactttgcgtgctgcggtgtgacgttaccgacgctccatgacctattacaacactacgaagaagcccatgcgaccaagtcgcccaatcaaggccaccgccagagccagggtgaaaatcgagctgccttggcggctgccgcaatcgcacaacaacagaaccaacagcatggcagccaaggacgtggcctgcagcctgaccgcaccctggatatgcagcgcaagttgggccagaatccgtcaccgttgcagcatgcagacctagacacaatagacgatatggagttggacgacgccctaggagacggagacggctcatcctcgcagatgttctcttctcagctgcgtgagggtggacagggcggatatggtaactccaaccagcagcagttaaatctaagtatgcttccaagccaccaaggatttaacacaccctcgcaacctggtacaccgattggatctggacgacccctttcactgcagaacaatccgactgtttcttcagtcaacacccccaccttgatggccaacccgctccaaaattcgcaattccgaaatacgcccgattcatccggaccagggaccccggccgaaattgacgaaagcatgatgggtgggttcggtgatctcagtatgcaaaataacaccatgggccaaaatcagaatcagtttggccgcttcaatgggaacaataatgatatggtcgatctttgcatcgacgagccggctaagcggctgtttagccccagtggcggtatgggttcgcccaacgcccactttaagctcagtggggctcagtatggcccgaatagcgatattgcacgacggatccgcgaacaacagttgctcgctggggtccccgacactactgttattcttcctaacgaagaacccaagccgttccgatgccctgttatcggctgcgagaaggcatacaagaaccaaaatggactcaaatatcacaaagctgtaagcttgatctccccctacattcgatattatttttctaaccgctcctttttttcagcatggccataataaccaacaactacatgataacgccgatggcacgttttcaattgtcaacccggagacatcagcgccataccccggcactcttggcatggagaaggaaaagccctaccgctgcgaggtgtgcggcaaacgttacaagaatctgaacggactcaagtaccataaatcgcattcaccaccctgcaacccggatttccagcttggaggtcgtaacctcgccctcggcggcggagtcatgcacgggcagaacatcaacgttgctggagctggcctccccggaattggcgaagaaggtcttctatgaacccgtgaacaaatatgtcattatgtcccatacataattcctagctaattgacgcgaacgatctcgacggctttcaggggtgaggcactcctgcacacgatgtcatgattttgaattgggtccggtgactttggagttattccttttctttttctctcttcgaaaattgttccttttggcttacttattgactgtgctttgtgatgccctgcttttgcttttcgttctgctgtccgatagattctactggcatgatggttttacccccacgcttgatatccctcgccgttttcagatctacctacttggcctggtaatagaggaacttttgagcgctcaggaccaagatcaagaccgtctctcaccaaagagccgtctagaagagacttgcaattgcctgcttttacgctctgttcatcttgttttgcttatacggcattcgcgtctttcacgggagacaaattagaggaattggatatctcccgaaactccccactcccaatcctgctattcatttgcttttgctgcgtccttggaaagagcttcgtgccttgttttcgcgttcgtgcccccgttctttgcgttcagtgtttttttgctcatgtgccattgtcgccttgggtacctggaactgaacaccatcaagatttggaatctggcaagagatttgaccggtccatctggtacgtgtgcgaggtacgagttccaggtgtggttacttctctcccctctttcacaccgagttggtgttcgctttttcttccatgctcccttctatctagggattggatagggactggatttgggatttgggatctgggatctgggaatcttaaaagtgatttctcggcgttggatcgttgtagatatggattttttggatatgattcttggctctttttggctattgttatttatcttcttttctttccccttctcttgctatttattcatatttttgactttattttcggtttcttgttattgtagatccgcgttcgggactaagacttagtctaagggcttaactagcaccttctatccaatcaatgttatttttgtctcgtctgctaagcagtaatgggagatgatactcaggctagtggaagttgttcagagtcatagtttcatttgtgcttattgtgaccagtaagatctctttcagtctagtacaaaaccaacctcgaaggcatggcaagaagcaaagagaagcatgtaaaaaaaaaagcaaaagcagaacccaccctcacttgtaagcgccacgagaagctagaaatcaaagaaaaaagcgtagtaaaagacccggttgctgaccatgtcgatatttgggtagtgagaatcatgaaatatttcgcttgcacaaaccgtttcgagggcgtgattgaaaagacgtagggattggttttcgtttgtgccatgagatagagcacatgtaaggggagaaaaatgttacagaacgaggaaagaaatgtcatcaatggagatcggaagatttgaaaaagaaacaaggagtgatggtgtcatttcgactaccattcgaattcaccctggcccttgtggaagacgtatctagttcggttagtatatgcataacgtgggagagtgggatgacttactctttgccaccagtggtcaagatgccatccttcagagtgcacttccacttgttcttcacgcgctggactttatcgtatgtgcaaagcatgacctggccctccgattcatctgcgtcatggtcatcggcaacgaggtcatctggatcatccaggtccgaattgatggcgtcttcatcttcctccttgatatcgtcttctgcaccatcaaactggccagtgacgcggggggtagatgaaggtgacccgggggtatcttggctgagaggagctgtgagagccacacggcgagcgaccctagaagaggactcatgctcttccaagggacgaaggagaccaccggcctcatactgagacatgcgctgcttgagatgctcgcgcagaagtcggtcaccttctccactctcggcagctgctctacggcgtgctacctctgccttccagtcggtcaatgggtcacctccaccatcagtctgtccaggacccatgtgtgggtaggcctgttcttgtttgatttgtggcatttgcccatgggcattggggtgcatctgcggatatccttgtccagcttgggcctgggcttgcatttggtggacggagttggcggctgcggcgccgtatttctggtgaagcgcatttgcagcacggtcgcgagccgactgagggttaagaccatgcgggggcatgggtgtggtcaagtgctgcattccgggttggccgttggatccgggctcggtcttgatgcgaggcccacccatgggaggcatagtgtgcgagggcgcaacttggggaattgaaacaggctggtggacatattgcggctggggaggttgttgtcggggaacgttggaggggacagtggcggtggggaggggaacagagtgctgttgagcaggctgaggagcaggatcccaggggaaatgagcgacgttcacagaagaaagcttgtgttgccaggtctgtatagatattaattagtgtcgggtctgctgtatgagataatcaagaagagactgagtcttggcggtctaaaagcgcctaagcgggtatgagcggcacatataaagggagcactcataagccggtgtccccccataagcaccgcctcccgcaccacctcgcccatccccgcttttggggaaatcatccacaccagactttgacaacacaagatagacaatatgggtagggaaatatgctactaacctcacggagatcatgcagagtctgctgatcgacaccactttcctcaaaatcgacctgggaggcatcacagacctcctggatgaccttctcgaacaccgcaccctatgaaggcacatatgtcagctcttatttcaatggaacccccaagatggattgggagaacatggttatgagtcaagagtaagtcgctatgcgagcgacagctgggaatagacaggtggtcgccagagaagagttgggacttaccacttgctggttggacatgattgctgagtgagaacaggccgatgagctggtggatgattatgcgaagggatcagagagctaggaataggtgaatggtgaaatgtactaggtaaggatagcttgactaggaagtaaagtgctccgtcgcaactatcaagttgctgatcgatcacacccacgaatgacgcaataggaagcaatttgtgaatcgatagtttgcacacaaatagaaaagagaagaaatagtctgaaagacaagtgccgcaagtgcaaatgtcagaggaaagcaagacgatgagtttcgcgatgggttagcgaaggtgaaagtcacggctctgcggtcgaaatcccactgtatccctgaggcttagtcatcggcgactaacccactgcgcactttcaagtagaaacggaagtgaattgaaagatcagagaaagaatacagatgaaagagatgatcatggacgagcaaagtgaattaaaacagtcgtaggaatggcatttggacaatttgtacagccagtttacggaaaaatagatacagagaacaacaccatcagaacaccgaaatcttccaaagaaccattacaccgacattaatgtcccggctcatcaatgctttcaatatcacaatgaacaagggtattcaacaaattaaagcaaaaaaaaagattttccagtcctttagcggatggtcatagacttggtcatttgagccttgctgccgacaccaccctcacgagaggaggaggcactgctaccggccttgcgctcaaagatcttccagaacttcaggctctcatcagcagcagtggtggctagcatctgtccatcagggctgatagcactgtggaggacacgagtctcgtgagcagggatctcgacgttgcggaccaaagttggatagctccagatactaagagagttgtcggggaagccgctagagctaacaatctcgcggtagtggttgctccaacggagagaagtgacttgtgagccagtgtcaatgctgttggtacgggcaccggtggtggtgttccagaagtgaatgtgacggtcgtaggaaccaccgccagtggcaagaaggttggattgccatggacaccagctcaaagccttgacggcggcgcggtggttggtcttggtgaacttgggagcgctcagagaacgagcatcccaaatgttgacaaggttgtcatttccgccagtagcgagctgggcgccgtcagagcgccattcgagaccgcagacctcagaggtgtgagagaccagttcagcgatcttgtgctctgcgatgcgaacatcgtggttatagacaagcccactacgggctccagtggacagagtgtgcttattccagcccataacaccgacgcgggagtcgtggccgtacatgctgcgaagcttagaaccttcctcaacgtcccaaatctggacctcaccggttcccaagccaacgccaacgtaggcaccgtcaccactccacttcacgctgctgacgtatgtgtcgggggaggtttccaaaaggcagttaacagagccggactcggcagaccagacatagacgtttcgctcgagaccgatggcgacctggttaccagagctccagtccagcaaattgaggtagtagtcatccaaaagaccgggggcgtccaagacccgttcgggcgcagtttgaacacggcgacggaactgggcagatgtagatttggcaggtcgcaggggacggttatattgagcacgaagatcaataggcttcgatgactcgggagggggaggcttaaatgcgaggatgcgagtgttcatgttcaccccacaagcttcagccagagatgatttgtaggccacggcatcgggagccgggcgtgtgtaggtaggaggatcattatcgtctagacccaagctctccaaagcagcagttaggtcatcatcggatccacgcgtgccaatgtcaaaagcgctgactgccgaggcgaggactgatgatccatcagccgcaccgctcttagggcgctgtttctcttctggctttgcggccccgctagtagccaggccctcacttgcggtccggttgggaataaaacggtcaccagcgttgtgaggaatgcgcacagttgtcttgctggtacgagaccgggtgggaatctcccggcggacatgctccttggtaggagtgttggctgtggttgcacttgtgccggtcaaggtccaatccgagacaccgagctccaagtgcttgggtgatttgcgggtgcgggtgatggcaatgtttgacttgttcgacttggtcgccttgggagattcacggtgggtggtgcgggctgcttgagctgcttttgagatggacttggcgaagtgggcagagaggtttccaccgtataccgacttggtttgactgcggccagcctcggactggcgaggaggaggggtgaagggtgacgagtggccgcttacgcgggggttgggcgaaggactcagaggcatccggcctccagcggtcttggaagagaaaagcccatggtggctcttcaccggagttgacgcagtaacagaggccatggtaatatatgatcagagtagatgtaaaggatcaaccccaatagaagatgcaatacgaatcaatgcagaccaacagaaaagtatgcaattgagaatagtgagattgaggaagaaaaaggaaaggaggtcaggagacacgcgaataaatagaaggtagctatggagtactatactcgttgctgaaaagtattgaggctctccccatagcaacggttacctgagctacatagaacgctaacctgtattgggactagcgtcgacataccacgcttgcctttttgggtgacacttgtcttggcattaaattccatgccaatagcctcttaattaggcaagaacaaagaaggcgagaggctatacagaatatatgtttgatagacctcaaatgaagaaaatgccgtgacctacggtgccagttgcggatacaattcatagccccccttttcgccactgggatggcgcattcatctcctctttgcaacccccaccacgctcctctcacccagttccaccgagacccaccacgacttctccctggtcgggatcttcgaggggttttaagccgatatcctgctgtactccctctatggcaatgcaggacgcctacctgatgcctaccagccaggccggcggtcgtcggaccagcgccgattatcgacccagcataaaaaaggcccagggccatgtccccgcgtgcctggtcaatgcctcggtgacgtactgcagcaatgatcgcatttatgcgttcgggggttttgaccagtttactgatgaaggttcacatcaccttaagctataattctaaaatggcactaatgatttttagtttacaaccacgtgctccggctggacttggagactttgcgctgggagctcgtggacaactatggcgatatccccggagttcgcatgggtaatgattctctcttctcattcgtccatgtttagtgataaacactctgactggaaatcttattttttatagggcatacggcgacattgtaccaaggggataaattgattgtgtttggaggcgaaaatgagcatcgcgaatacctctccgacgttgtcatccttgatctcaataccttcacctgggcactccccgaaattcgcgggtcgatcccgcgtggccgcgcccgccatgctgccgtcattcacgaagacaagctttttattgtgggcggagtgacaggtgtgggaggcgtgacaggggagaagaatgtgatattggatgatttgacctatttggatctacaaacatggacttggtctcggacatggagcttcactgctcgcttcgatcataccgcttgggtttggggcacacggctgtggatatttggtggattgggtccgaacatggaacggactactgatatctggtggctcgacctcaagggatctccttcgttggctggaaacaccactccccaaggtagcgtcaactccctgggcatcaatatttcgggggcttatctcccagactctatatctagtcctcatcaaatgtctccccgctccggaatctacgctgccaattcaggcagtgtgcaggtacgcaatttgggtcgacgcaagccagtcgcgcccggtgccatatcttgtcttaggtttgattctggtcctcatgtcccctccttgttttctggtactcattttcattcattcgcctctggtgtcctgctcgacctaatcacgccgtcggagaccgtacggtcgcatgattgtaacctgtcggctctggacctcaactcgctgcgctggcaacggctggctgatggtcaagagatctttcggccgggatatcgatggcactattgcacagtcaatgacacgggtaccaaagcatggctcttgggatgtagtcttgatatcgcgaatgtaccaggcggaagcgacgagaatcatatgagtgaagtcctgactatcgatttggaaaagtatggtttactaggtaacggactgtcgtcagaaccccccgaacaaggcgcaccttggccgtcagatccaatgggctcctctcaggtttccgggctcgggaccgatctagccgctgttttcgacgaacctcctgagtctggaagtggtacagactttgtcatcactgctattcgtgacgatcatgacgggtccatatcggaagatatgggcgacacgccgtccgtttccccaacccagacccagccgacctttgtggcgcagaaccgctggacctcagagcccatccatgtccatcttatcattctccaggtcaggtggccacatttcaaacgcctgtactccgcccagatggctgagtaccacaccaagcggatgcacatccccgagccttattctgtcgtgcgcgcgtttctctactacctgtacacagacagtatctccggccatccagactattgcttgagtgccatcgatgtggcgggtatgcttgttatggccaatctttatgacatgccgaagcttcgtctgctgtgtgtcaataggttaagccaagagcttgacgtagacaacgcggccatcatttgggaacgtgcggggcggaccaatgaacactggttgatgcgccgagcagcacagttttgcatgacatactggggccgtgtggtacggacagacgggtttaaatccctcagccaccagagtttgattcaactctgcgaagtggtggatacagaaggtcgcgtcttcgcagggcctgaattggagatggtcacattcggagcagattgcctaagtgaccgagataagacctctcgaatgcggctgggatctactgccgatgagatgtccgaggccgacgcagacgatgaagggatggagatctcatgaattgcatgaattgcatgaaattgcgaattgcacgaatggggcacgcattatattccggagttcttggcggatcatttgtttattaggttgtattgtatttacatccatctctaccagttttgaatatacttcttccacttctttgtgatcggccgttcaaccgctctagggctggcgttgagcccattcgtcatgagatgtggagcctctcgacgctctcgacgcggacctcagtccggatcgcggaggtcattcctgtcacgataaggagctctccatagtggtagactcactggatttcaagaagataaaaattaaatagaattagataaatatcgatgtgcgctcgaattaaacaatcggattacacggcttctacagttcctgctttgattaacattcattcacgtcgccatggaatctaagcaatctactcttccctcggatttcctttgggggtttgctacagccgcataccaaattgaaggagcagttaacgaagatggccgcgccccttcgatatgggatacattctgcaagatccccggcaagattgccggcggcggaactggagatgtagcttgcgactcatatcaccgcacacacgaggatatcgccttgttgaaagaatgcggttctcaggcataccgattttccctttcatggttcgtctctttgtgttccttgcctcgagtttcaatctttggaaatattttaaccagcttgtcaaaatctataggtcccgcattatcccactcggcggccgtaacgatctaatcaacgagaaaggcatacagttctaccagaagttcgtggatgatctgattgatgcgggtatcacacccatggttaccctcttccactgggatcttccggatgagctcgacaagcgctacggtggacctctcaataaggaggaattcgttgccgacttcgcacattatgcccgtgttgtattcgaggcctttcggtccaaagtcaagtactggatcaccttcaacgagccttggtgcagtagtgttcttgggtacaacaacggttccttcgctccgggccacacgagtgatcgcaccaagagcgcggtgggagatagctcgactgagccgtggattgtcggtcatagcttgttagttgcccacggagctgcggtgaagatttaccgcgatgagttcaaagaacgggacggtggtgagattggcattacgctgaacggtatattcccattcttcctgcatctacggagccgtttactaatcagaccatcgactaactaggtgactgggccgagccctgggattctgagaacccagccgatgtagaagcctgtgaccgcaagattgagttcgctatatcatggttcgcagaccccatctaccacggcaagtacccagatagtatgatcaagcaacttggcggccgcctgccaacctggactccggaggacatcgcccttgtccagggcagcaatgacttctacggcatgaaccactactgcgcgaacttcatccgcgccaagacaggagagccggatatcaacgatgtcgcgggtaacctggagctcctgctcgaagacaagaacggcgtgggtgtcgggccgatcacacagtcgccttggctgcgaccatctgctatcggattccgaaaactgctcggatggctcagtgagcggtacggctatcccaagatatatgtcaccgagaacgggactagtgtcttgggtgagaacgatatgccgcttgaggagctgctcaatgatgagttccgcgtgcagtatttccgggattatatcggtgctgtggctgatgcgtatacccatgacggggttaatgtgcgggcgtacatggcttggagtcttatggagtatgttttgagcttagttcctcgatggtatatatccgactaacttttttacttacagtaacttcgaatgggctgagggctatgagactcgcttcggtgttacttttgtcgactatgagaatgaccagaagagaatcccaaagaagagtgccaaggagattagccggatcttcgatgggttgatcgagaaggtctgagatagatgcggcgctgattgatatttacgctggtagactccgaggactgctatgatacctagattctatacgaatttttgaaggcctatgatattacattctccagttatgccgtgagctgtattgttcggtacgcagtatagaaaaacagagatgaaaggaggtacagtatgaagtagctgcccttgtggactgggaagcggttggatggtatcggaatactcccatatcttccccctcttgcagtggattgacgattggccaggatatgttgagaagattgtcgatcctttgccgctggaggatgccatgatgcgggttgtctttaatgatctagaattttagagcgagataacaacacttgtcgatcacaaaggcttgattgtgatttgctcaagctcaagtcacggtccaaactagagcttgatagccagggattcaataatgctccaagcttgattttatttaccttaaatgagttgattaagccttgccagagagtaaagctgataattcccacaatataattgatagtgatcgactttcgcgagtctatcatatttatgaccgaggccgatactttatcttcctaaggctaaagttcgtggaacggcataatttcgagcagcgggtaaagatccattagaagtgactccagagcaactcggaagtagcctggatattctccttcttcgacctgacttccatgatcaaacgatacatccaatacatacacccacggcaggtcggttgccatagagtccatagcaactgaatcgacaaccagagacacaccagtgtcaagtctcggagcgataccgttggactccttgtactcatagtattccctacggcgagaatttgtaaaaagccatcatacgacctcccgagcctccgtcgtaaggataggaatgagatcttactgctggatctgtttatgtgtggcgccttgtaaatccttgtcttcgtagcttggcatgaagcatttgtcttcggcgttcttccacccgcggattttcttggtcatggtttcctctatgcgcgcgtagtctttctcccactgctcccagcgttattgaccagagtaatcggttcggaacctgatatatccaaagtcatcgtatccttccctttctactacctgcacaacgaagtcgacactttcttcaaagagtggcacccccggacaaggtggtaggccccgctccacgcggagtctccgtcgatgttcgttgtggattgcacggccgatcactattcggacttgaacattctcgacagaaactaaattcttatcaatctgacggagttcctagacgatctgtattgaaaggagaaataattccttgttttagtggaagaaatctcaaacatttggttagatcacccacttcttctggtatctcgcgtatattatcaagcagtttgaagtcgctccagggtccatcctggcggtacacaagacatttcggggctgagaatcgcagacgtctcagaaaataaagcacatagattgaaagaaaagaacgtctatacaacataggaaggagtgtgggaaagggaagtcaagaagaaatggatagttggaagcagtcacgggtcatgaaagcttagttccaagggtcaaagaccctgaactggagcctgggctggagcctatgctagtgcctgggaagatatcctaagcccaaaaaggcaaagatttattttaagcttctcccgccccacttccgagccgaggcatcgcgaggaccgttgataaaaccggcggtgtgcagtaaatacccggcggtgactacaggcaactggcagtaatagtagccgcactccgttccttcccttttgagttcaccagcatggatatatctcagatctccaagcagcttttaccagcgccgaagagattcccagactgctgcttagccatctccagcaccttaatcacctaccttgcttcgctcctccccgaaaagcctaaattcactatctcaatcggcagcggatctggtctcctcgaaggtctcattgtgcattacgacaggaatgtatcagtggagggtgttgaggtggattccactattaatcggtacatcgccgaagaagatatgaatgttgtcggcggaggttggggtctctggtctgccgcccaacaggcagcggcgtggatgtttgtctacccacgcgacccaaaactcatcaccaaatacattgataattatggtggtcaaaatgtggattttattgtctggcttgggcctcgggttgattggccagactatgagacgcggttttgtcaatctccattctcggagttgagttttccagatcatatcggattaacaccatatgagactgtggtggttgctagaaggccatgttgatatgaactctgcattttgacttgggaagattatgttatacgactagtagtgcattggaaggctttctgttttgtaattgagtcatggtcccttgtcctagttagattattactatcacgatgtcatccctggattaataaagaccatatttgcttgcttcatttcttacagaacattatcagagtaaatcatcatggaatattgccttccagtctcacatagtaattcatacattaaatacaaagcccgtggccaagctcaaagcgcatacctgaaatgtttggactccatatccgtcaagtccttgaatccatccaagatagcctgagaggtgatgtcctccggagtttcatcactaccagccgcaacagctgtagcatctctccttctattctccattttcatcgatatatatgtcgcacatgctagaacaatgatgcccgcatagcaaatgagcaggcccagcagacccgagtaatagcgcggggcctcgtcggcgaagaagatgttcgctccggcgacattgccagccgcatatagcgagaaccaaagcccattggcgaccgcacgcttggtgtggccggctacattggtagcaagtaggttccacgagataataacgggggcaccaataatgtactgcagccaggtgcatccgactaaagtccaacggtggtcaaggctggtaaagcggatacccagaaggccaccgaaggggattagagaaacgactgcaagcacgatgcagcgggaatctttaacgtaggtggcgatgataccgcagatgggaacgactacagcttcaatcgcgccggtgggtagttggaggagtgtagtgtagatcccgctgaagccatagcccttgatcaaggctgatgcgaaatttgatgagccgccgttgataacaccgcaggcaattccgactccggcgcagcagaggactctgaaatcgtagagaatctccagcgcctggcgtggtttgatctctcgggtcttcacaccgatcatgttttcggcgacacgctgcacggcaatcacgcgctgtcggtgggtcaggaagcgggcagagctgggcgagtcgggcatgagccagaggaagatacaggcagtgaggaagttgagtagtccgatggtcaagaagatcaactgccagctgcggagcgcggtgttgtgtgaatggccgaggccgaatcctagtagggcccctaccatcgtggccatgccgtttgcactgagccagacagccatgcgcaatggctgctcggagcgcttgtagaacattgatgtcaggttcatcactagacagaacaatgttagtccttttcgtgtctctggtttgtgccgtggtctactcactgcacggactgactccggcttctgccattcccaggaggaatcttagcaccaagattcctccgtagttcttcgctccgacgtgggcaataacgagcacactccagatcagaagcataccgcccatatattttgcgattggcaatcgttggattaggaggttggctgggagggcccagaagagataaccgaaattgaaaatcgccgcaacccatgaatatcgttggccttcaagaccgagatctgggatcaaagagtatgcggatgcataattaagtgatagtttgtctatatagcacgttagttatagaattaacaataggggaatgttcttgcataccgaggaattgaataacataggtcaggtagagctaaaaacacgatcaactgtcagaaacaacatcaaaatattatatcacagtcacaactcaccaccggcataaccctccagtcgagaatcctcagcacctcggcgccctcagtctccagttcctcggcagtcagctgctctgcctccagatacagattcgctccgatatcatgagtctcgccgagtgccacatgtgtgacatccttctccgcagtggagtggtcctcctttgtgtcgttggggttcattgtaagtggcgggggtcaagttgaacagaactgggccgtatatcaacgtccagcgctctattatataccccgcgtactttttcagccataacttgctatcaacgccaagcagataagcaatgttctttctttatctacaaagctatctttggtcaggtcgatcgttggagataggaagatgagcggccaatagtccgcatataaagtgtggggtaagcggactattctccgctgtacggggtcatatacttcgtcctgtctagatcactcgaaggcatcagacgaaaaggaaccatatcactcgcatttcaaactttcaaagcactcctcggcatggctcaccaatcccaagacttatcgctcctggacgccagtatctcggagctccaatccgcactctcttcaggattgctctctagtgtgggcttagtatcacgatacctacaacgaatcagcgtctatgatgcaagtaatctaaagcttactgccattccgcttctaaacccagccgccctcgatgaagcagccgcgtccgatgcttggcgtgcagctggtctgccgctgcgaccgttggagggtatccccttcctcgcaaaagacagcattaaagtgaaggggatgaccgtggcgagcggctcacctgcatttgaaactctcgtcgccaacgaagatgctgcctgtatccaactcctccgcgaggctggcgccgtgcttctcggccggacgaacatgcccgccatggcgtacggtggtatgcaacgtgggtgttatgggcgcgctgaaagcccgtataatacagcatacctggctgcggcgtatgcatccggttcatcgaatggatcggcagtcgcgacgacggccaacttttgtgctttttctctaggcagcgagactgtttcttcgggtcgctcgccggcgtcaaataatgccgttgttgcatacacgccttcgaaaggccttcttcctctccgtggtgtctggccactctacttgacttgtgatgtcctagtaccgcacaccaggactatggcagatatgttccacgtcctagatgttctagccgtgtccgacaaagccccgacgggggatttctaccaggaacaaaaactcatctccctcccttcgatcgatacactccgaccacagtccttttcaggattgcaagacggcacatccttgcgcgggaagcggatcggtgtaccgtcaatgtacatcggaggcgataactgttctctatccccagccagcagagtcaacacccggccctccataatcaagctatggaaaaacgccagaaaggccctcgagtcctgtggcgcggaggtaatcgaaacggacttcccaattgtgacaacctacgagtcaaacgcagacaagggccagctcgtcaccgtcgcaggactaccagaaggatggtccgcgctggagcggagcgagctcgtcgcacatatctgggatgacttcctgatcaacaacggccaaaagggtctcgatagtctttctaaggtcgatccgacgacgatcttccctcttgcaccggggtctctgaagggtgcacccgatgcggccaatgcgctgcggtgggacgagatggttcaatacccgcaccggaggccggcgtctgttttcgatatccccggtattcagcagggaatccaggctcttgagaatgcgcgcaaggagacttttgaggactggatggatgggcttgggcttgatgctgttgttttcccagccaatggcgatatcggagctgctgatgcggactgcgatgaggcggcttcgctgtttgcgtggagtaatggcgtcaagtactcgaacgggaacaggcctattcgtcacctcggtgtccccactatctccgttcctatgggtctcatggaagatacggggatgccggtgaaccttaccttcgctggaaaggcatacgatgataacagtctgctcaagtatggcttttcttttgagatggcgatgaagggccgtgttaagccaccgcttgtgcctgctcttgactctgatctcatcaagggtggtcaagatcctcggccatgggcttctcgatcgaccgttgagttggtagtggagactcaagtgaagaagattcaggactccaccgttgtggttcaaatccagggatcagtggtacccaaggactctcaactggagactatggaatgccatatcaacggtcaagtgttcaagccggccatagagggcgatagatggtttatcatagcttcctaccctgcatcggaacgtgatcaaccctggaagaggtggtcgagtcctgctttgacacagactatcatagtcatcacagctcatacgaaggatggctcgacaacgggcaagttgatcctactatgaagacttagtgtcgtcaagaaatgtaactcttctttccattactccattatatagacctcctgaaataaattacaaagcgctcatatttacgacatctctctataatcttcctctaaaatgtcctgatgtatactcctcccatatatcatatcttcaatcatccccaagacagctcggtgtagataactcttcctcaactgctccaagtgcaattcagccacttccagtggtattgcagcactagaattagcttcaaatgtgccagaatcccacatgatcttctgtcgtacgaactccagcactttcatatatggcgttgcgtcgttccaccggtcgacaaagccagctagattggctgcacatgtagcaatggcctgctggttgttctctctgatacgctgttgatcccgaatatcagtgattggggttgtcgcccagacaatgtaaagcatcatgattcccgctcggaattggaatacaagctaatgatgattgatggttagtcaaaatcacatcgggtgtacctcgatcggaagaaaaagcagaatttcgacacatactgcagaccaggtaaagcacatcacatgtccttcttcttgcagcagccggaaattgagacagacctccgctatcgtcgcgagaatttcctctattccgtccatctcgatgagatcgcctttctcttctatcaggatcaagagactgtaaacatacagctttcgcatccatataggatggagatagccgtgttggtcactgtctaattcgtagtgtggaatctcttgtcgccatctatcgagagcggacttgaatgaggaggtataacctttaccatatctggcgaggggatttcggggtcggttctcccgcgttcttctgatgctggcttggatcttgcgtagtcggaacaagtgtcttatagcggggtttgtgcttagggttggttggagggtatctcccagagtgcacatctaagtagagaattagtgactgtgaaaagcttagaaagttgggaataactcacgtcatcgtcaacaaccctgtaggcagccgacactggtcggtcccaccctgaaacaatgacttcattgagcatgtagcaagtaatgaacatgttctcagacaaaacctcgctaaattcggtcatggatccattgtcgcggcatatcgatacgtgcttccggatctctgtcatggcagctgtacagaaaggtagcacagaagagacgctcgttatgatgtcttcggaagaaggagaatgcatagcatagagtatcatgaacagtgaagcttggatttgcaagaccatagacgaatgcccgacaacatatgggtaatatctcatagccgaggtatgatactcctttgaccgaacggagtgcgaagggtctcgttgtaaaacattgcaaagggatgcaccaatagcatacaccatctgcagaaagaaggctttccattcatcctgcccttccaggactgcctcggcatgccatgatttccaagctgtttcgttcaagaagggccactcgcggtgagtcacggagaaaaacacatttgtatagagctctttgagccaaggggcatcgtcatcagtcaaaggatacgagggtgccaggtcaatccaggggacgtcgaatgtcgtctccgggaataaagagaacgcgtcaggcgagaaagatgatggatattttcgcggtgatctttcgctgctgtgttgcaagtctggcagaagcataaaagagccgtcattctccccgctactattctgctcggccatcaggtagtccgagtcattgcctgtattactgcgcttgtgttctgggtcttcaaaatccgtctggactccagcatcacatgtttcgaccgtggtctctataacgctagactcatgatccagctctgcgacccgttgctcgagttgtttcaagtattccagcgggattgtgatgttatctcccatcttccgagaccgagccggcaagcattcagcgcccttgcgacggcattcgccacatgaaggttttgcatgatcacatttccgcttgtgacggaaacagcgatcgcatgctatttctctgtgcttgagagggcgcgacatgcagcaattgttggacacatacagggagtgagagggaatgcggggagactcgcgataacggatccgcgccggtacgatatcagtcctttaataagttgctgcagaaggaaggtctaggcgatgataagaaatgtttggttgattatatatcctgcttgtgttaagtataacattgtaagagatctgtcaagtcaggtcaactggaaataaagtccatggataacattcatattcgtcccatacccgcgctcactgtcagtcgacagcgacaatcagattttgatccatctttgagccttggtatcatatccgatcaacttaggatcaacatgtagactcttgagcatgaactccattgtgaactcctgggtaacaatgtcagcgcatagattccacccaaaaccacagtaatatcacaatacgtacttgatcctggctctcctcatcatccttcttcaatggccagccagaagaatcctcagtcccgtagttatcaacgtctccctcgtcctcatcgacatcctcccgctcacgattctccccatcaaactcctcccaccgtgtcgcatcacgcttcgaccgctctttccaagccgccatccctcccatcccatcaaacctttccttggcaccgacaaatacctcatcggctgcgtcctggctggcgagccgccatttggtgatgagagttggaatctcgatgtatctggcattcgtctcgaggttgtgggcctgatttgctgtttcaagtttggtgatgagtgcatcgacctttgactggatctcgcggtgctgcttttgcagttctagaatctctgggtcggtgctttggaatgattgtaaagggaatgaggaagagattcgtaccacgcgcttgcgcttagggggtactagagttgttgctagatctggtgaatttgatgttgagttggactttacagtgagggtaggagtcgctagaatttgcgtgtcctcgagtgcgacaggcttcgatggcatgtcgtctatctttgttggtgcaggtctgcgtagcggggacttgaacggctttgagagagcggtagctgcgtcgatgcgacgacgtttaatagacggcttgtccatgatgcatcaattggatacagacctcggaatttcgatgtgtttaacgaggagaaagaaacatagaaaagttggagaagccgagtgagatgcggagatgcgatattcttatcgataagcaaacagactatttatctacaattctagaactcctcaatgaccaactcctcctgctacccattgcccaaagtcaggttcaccaggctgagggaataatccacggtcgttggcattcccatctccattcggggcattggcgttagcgttggcattggcgttctggttctgtcggttgcgctgctgctgctgacggtagtataccaaaaccaacagcgcagcagccagtccgacaatgaggagaccctcgagcattccctcgtcgatatcaaggtccaggtcatcatagtagccatcttcgtggccttcggattccaagccacgatattcatcatcatcaccccgttgtagttcataaaggtcttcgtaatagccatcctcgtcgttctcgatgaaagccttgacccattccttgaaggtacgacggggcttcgagtctagtgataaacgtaagtaagaaactagaacgcgattaatttcacggggtaagagcgaaggagcagcttaccttcctcctcatggatggggttaatgtctccgttagtgatgcgattccagtatcctcgagcccggagtttgatcaagctgagcttcactggcagatacgcttcggggctgaggtcaagagccaaatcataatatcgcttggccatgtggaaatcctgatctactgccacgccattctcatgcatccatcccaaattccagtagccctgggcactgtggtgggcttcagcagcattgtggtaacaggtcgaggccttgtcggcatcgataggtgtaccagtaccagacaggtagtagtcacccatcttgaccaaagagtcgatgttggcttgcttcgaagagcgggtccaataaatcaaggccagtcgcgcattgcgcatcaaggaggatcgagccttctcagcccatggaaggatggaatttagtgagagtacggagcgatgctcatcaagcagataagccacatttgcctgtgcattctcatagccttgctcggctgccatcattgacggaatgagagcgccctccttatcaccggtttcgtaagcagcgtttgcctccacgaaagctgagtggacgatctctgctttttcggcaaccattttatagtaggcagcggccacaccacagtgacgctgtctgccaataccgaagttggccatctcagctagataatagtacgcctccatccagccccagcgggcggcaagctcgaagtaacgtgttgcggttgccacatctccttggtccaagaacagagcgcctaatcgtgattctgacgcaggggaatcctgctctgccgctgctttgaagtagtgagatgccttgaaggcatcctgcggaacaccatagcccttgagatacatcagacccatccaatgctggcacatcgggtccccgttcgtaatacccctccggaaccatgtgagggcagtcgggaagtgttgcttaacaccctctccgcgaaggtacatcaggccaatatgtcctgcggccttggatgccagtttatcaagccctgcaggggggtttgagttgacggacccatccttgttccaatatttcttggtaacaaccttgaaatgcttcatagccagtcggaaattccgcggcaagccccgggcgccctcgaagttcatcttaccgagggtgtatgtagccttcagttcacccttccgggacatgagatccaagtattctagtatatcttccacgctggcctcaggagaggcattggcagcgtcccgcgcattttgacccgagctcgacacactggctcctggaccgtagacaccaccttcttcgtctgcccaacgataagattctcgaaccatagacctaccacccggagggcctgagcggtagtactcgaccgccttgtccgcaaccttcttgtagtaatggatcgcatggtcacaatccttcggcgttccgataccagtgtggtagcgatacgcaagtgtcatctccgagcggatgttccctgtttccgctgcaaactcgtggtacatcagggcctttgcctggtcgggttcgaccgcaccgccgatgcccgtcgcatacatgaacccgaccatgttctgcgctgtgttgtttccgtccaaccatgctagttcgtggtaccagcggaaggcctctttgaaatcgcggggatgggagaagttgccatagaagttcatctctgctaacaagaacatagcatccgggtctcggtcttcgtctgcagctgttctcagctcctccactgctcccgtcagatgtttgtttattttctgctcgggtttttcggtcgaagggcggttcaagaatagcagtcggaccgtttgacggccatagtatgtgaccgtccctagtaatcctctcgacttgtcggattgaaggactggattctttattgtgcgaagggtattccaggcattctcgactcgttctatcatcacgatgaaggcaatcagtatcaagcgtcaggcgataaggcacaagtcgtctctactcacgagtcataggtcggggttctgcttcccctgccaggaacgtgaattcgtggtctgcatcgcggcccgttgccgcggacgctgtttggtcagtaagcggctgaccaggcccagctgcgcatgtctgcaatagcactgaaaaggggtgtcagtttccgatgcgggcctgcaggtgcgggcaaatcttacgcagggccgagagaaagtgtgagagcggcgtcctcataatgcctgcaaaatcctgatgtagtgttggagtgtgaagcacattgcgactctcagagcaatgagaatcacaaaagcgacagagctggggatcgtgatatgatgtagttgcagagtacgggccacttggcttgacggagcttcattttgccgagggccaatcactacatcgtacctgtgtagctttctacgtgcatgcatattttctatatgtaagatgttatatgttccgagattctgcttgtctatctcgtttaacatgttctccaattcgtatgtagctttccttagcctagactttagactatctataaaagcggtgagaatatataagctgccgaagtagagacatcttgttctctactgcatacgaattatagggaaaagattggaaatttcataagcattgttggaatctactcgtccctctggagggtgtgtacaaacgaagagaagtcaaaatacatccccggtgcgctttccatgcaataaaaaggagtcgggcaattccccaatggcaatcaaagtccgcacccctatctcacagcatccatggacagtgtcctcgattctgatcgaaggttgtgcggtcttcgcattcgcgatgggggaatagtgcgccgggaaaacaaagcaatctcagaacgatggcggctgaaaccaaactggcacgtgttgttggttaattggttaaaaaaaagactaaagaggtacaatgaatgggagacaatccccgatatcgtgaaaaaaattatcaaatcatttccgagatttgtagcgcgaaaagatcttttttgtttaatggttgagcttcaagttgatgatggtacagatgtggaacacgagcctgagacaggcaagccatcttcgtaccatattcactgacgcggcgacgttgggctgtacgccggggatgtcgggctatacgccggagaggtaggtgacgtcggagaaccagagaaattgggagaagtcggcgagtatgactgggggctcgtaggagaccaaccaggcgaggttggagtgtacttgggagaagtgggagacgttggagacaggtgccgagcaccaccaatcgcgggactagtaggactgtagctcggcgaagtcggactgaacgccggggaggccggactaaagctgggggaagtcggactgtagttaggcgacgtcggcgagaacccaggcgaggttggagagtatgaaggagaggtgggtgacgcttggccgtatgcaggcgaggtcggcgagtagatcggagacgtgggttggaacgttgggctagaagacgagaacccaggagaggtcatcatcatccgcgggcttgtcatggagatgccaggagacgtcggcgagtagctcgaagacggagagtacataggagacgtcgggctagtattgaagggactcgtcggcgagtagctgctcgggctgcgaggcccaggactgaacgcactgaaggtactggagctagcctggtactcggtgagacctccagtaggctcctggccaatttggtgcataggcgagaacgccggatcgggatcgctaccggccatgtacggggagctggccataggagaaccagtatcgtactgagtggcagcaccgtcggaaatgatggcatccttcgcgccgaccgcacccatcagaccatagcgtgcattgttggacacgacggtgttgagcaagttctggtccaggtagacgtcgaactcacccgttccggcaggggccatctgtccaaggatcaagttctcagacacaccgcggcaatcgtcgagctctccgaaagcagcagcctcgagcagaatctcaactgtctcttcgaacgaacaacgcatgagggcaccattgtcggcacggttgataccatgacgggtaacgggagtcagataaccacgaacagtcatgacatcgaccagcagagccaagtgacggtgattaacgtaagaaccgtcaaaggcaagcaccagggtcaattcgcgaagcacagctgtacgggcagcctcaataccgaagacctcgaaaatctcaataaactggttagagtaggtgcgggaggcgtcaacgcccggaattgaaaggacagcagccaaagacgatccactggtttccaaaacccattccttgcagagaggatcggacttgctggtgtggagtgaaccgtcttcgatgactctgaccttgctcttctcattgatgaaagcacggtcaacgccgggaacacctcgaagggtcaaagtgtccagcaggtgttgctcaagcttcttcaaggtgacgtcgtactcaacgtcttcatcatcgtcctccttgtagtcttggacttgacggatacgaataacctgctcgtctgcgttgttatcactgaagatgacagcaatatcacgaggataagcctgcttgattctggtagcaacgtcctgcaccgtgagacccttgtcaagaagagagcgacgactgagaacaatacggagcaaccacctcgactgctgagatgcgtcgtcggcattgtcttcgggaatgatgaagtacgactccaccatatccctatcgttctcaatgacagtggactgaatatcgggatcatagtaaatctccgtcgactcggtcacagaccgcagactagtatgttccacgagacttcgaaggagtttggcgccctccttatcgtgggtcttcataccctcttggtacacagtcatagatggcgtcttgatgtttgtggcaacgttgagaatttccttcagacggggaacaccaagcgtgacgttcttagatgacacaccagcaaagtggaaagtgttcagtgtcatttgcgtcgcaggctcaccgatagactgagcggcaagaacgccgaccatttcaccagggttggctgccgcacgaaggaaacgactttcaatggcacccagtacgtgttggaatgctagcttgttaagcgaatagtctgtgacaagtcggcggaaagcgagacgactgcggagttgcgccttgaacagcaaggtcgcattgacctgagcctcctgtgaaatgggatcgtcaccacgaacgaccaccaagcgttccaggagctgctgaacttggggaatgacctcagcggggtgcaaatcactgattgtgccctcgcgaatacggaaagtagttcgggccatttccaggatacgctggatattaataggaagctgcatcatctcctcgtcctctttgaccacagaccgcaggaattcacggtctttcagaatggcctcccattcttcgtcgaagtatttctgtacctcgatatcgccggcaatttcgttggcttgctctaagatctctgggccgagggttcgctcggggtccataacatcaacacggaatcgctccctgagcttcgcgtcggaacacttgatgtgatcgacacgctggttctcaatgtgggcaccgtcgagaccatcctctccgtagatgaactggatgatatctccgagggagtttcgcacagtgccatcatatttgaccatgacttcctcaagagccttgaccagcttacgctggatgtaaccggtttcggcagtcttgacagcagtatcgatcagaccttcacgaccagccatggcgtggaagaagaactcggtaggagtcaagccacggaggtatgagttctcgacgaatccacgggactcgggagagtaatcgtccttggtgaagtgaggaagtgtacgatacttgaagccgaacggaatacgcttgccttccacggactgctgtccaacaagggcagtcatctgggaaatattaattgccgaacccttagaaccagaccgcgccatttgaatagcgttgttcagatccttgagactcctttcggtggcatcaccggcttcgtcacgagcattgttaagagcacgagaaaccttgctctcgaatgtctcacgcacattcataccaggaagggcctccaaagtgttctcggtggcactagccgtaatctcctcgacttcctgtttcctgtttcggacggcctcctcgatctttttgatggtattttgatcgggaatggtgtcaccgataccgatactgaaaccatggtgcagcaaccagtaaccaacgatggtttgggcgccagtgaagaatttcacacaagtgtcaggaccgtactcgttgaaaatggtgtgaatgacaccaccaccactggcaccgaccgtcttcttcgaaagcataccatacatcagctgtccaccgtgaatcaagagacctccatcattgagagggctgaacttctcaactaaaggcgagccgtctttgtcaacacgcagaaggttgagtccggaggggaaagccatgctaatgatctgctttccagtccagcgaggacgaggcttgatgattgccggaggtggaatcgcaccatcccagtcagggacccacagcatgaggttcataacttgttccttggtgaggaaggtgtcacgacggcagatcttgtaaataccgcagagggtatcctggacaatacccatcagaggaccgttacgttgcggggaaacaatattcttcgggaccaaagcgagctcggcgagctcagcgcgcgcctcttcgccctgggggacgtgcaaattcatctcatcaccatcgaaatcagcgttgtagggactggtaacggacaggttcattcggaatgtggagaagggcataacgcggacgcggtgacccatcatggattccttgtgcaaagacggctgacggttgaacagaatgtaatcgccattgtcaagatggcgctcgaccttccagccatacagcagttgctgggcacccgcacgcttagcgtgacgaagatcaatgcgctcaccgttgtcgcgaacaatatatcgggcaccagggtgcacgttgggtccatttgcaaccaatctctggagcttttcaatattgtagggggtaacaacttctgggtaagtgagaatacgagcagtcgagtatgggacaccgacttcatccagtctcaagttggggtcacctgtgatgacggtacgcgcggagaagtcgacacgctttcccatcaaattctgacgcaaacgaccctctttacccttcaaacgactgcgaagagccttcaccggacggtttcccttctgcatcgccgtgggctggccggcaatgtcattatccatgtaagtggcgatgtggtactgaaggagagattcgaattcacgaatgacatgctcgggtgctccctcctgctcacagcgttgaacgttttggtttgcacgaacgatttcggcgagcttgtaagtcagatcatcctcaccgcgagcgccacttgtggttcccatcacaacgctagggcggacggtcgggggaggaacgggcaagacagtaaggatcatccactcgggacgagcgtagtcattgctgaggcccatgatgcggacgtcttccacggagatgtttcggaagatgttcaatgccatggtaggcgtaatgactttcttttccggttgagccatctcatcctccatcatagccttgctaggcttccatgttccaaccaaacagattccttccttccgaactgtgggctgggcattaccgcagccaccgtgggagcggcccttttgggggtccttcgaaaattcgtcatcatcagcaggcgcgtccgcttcacataccaggacatccttggagagtcgccagatagaatcaaagcgtcgcttgggatcacggaaacggagggcttctgtaaactttgaatcggcctggtatccatgttagcgaagtgaaccagtcaagatttgccatcccaatagggatgactaaccgtgttggccttgatctttccacagttgtggcaaactgtctccaacagcttcttgattttcgtcaaaaaacctacaggggtgccaagagtcagtatgggctgaaaagacgaaaaggaggaacctgagaaatctgttacgcaccgatatggaacaccggggatgcaagctcaatgtggccgaagtgcccagggcattctttcgggccctcttcgcaagtctcgcagttgtattgacggtcgattgtacccaggcgagggtcattgatgcccttggtccgaggccgtaaacgttgatcatcctatgaatacttagcaatcaagtcaccatagcgcataggagagggaagtctcgtcggaaaacaatgcagtcgccggtaagaaaaatgtaggagtcactcaccagtgtttcgggatattcaatgtgacacacactcatgcgcttgatctcttcgggagcaaagagaccaaactgaatttccttgatggtgcgcaaaggcgccttggaataagggaaaaacacgttcgacatgatggcgaagttgcggtgacagaaaaagtggatgaaaaaaggcggagatgaaccagtcacgtaggcgtgtcgtaaaaccggtatcagcgacgaaagccggctcgtaaatgtcgcaaaaaatgaagcgaaaggcttgctcgtaagctagaagtcgaatttacacgtagcgacgatgaaaagaaggtggtgtggaagcagctggccggctgaggccttgggcagcccttgccacgagggcgccggcgacctataggtcccgaacgtcacggagcaaaaaagaaggagaaaaagagcgctgcaaagaagatcgtctttacagtatcttgaagaagtctcgcgatgagaatgcgcgatcctcctggattgtaaaggcggtgggtggatggagtgtcggggagatgaaagggtgatgttctgaggtcgcctcactgggatggggcttgagttttccctgcacgatggttgccgtctaaacggggctcaccgctttggcagaactcggggcaccttcccaaaaggtcggcaacggcagattgactgcgccttccactatggtgaatgaaagcggtgaatggcctaggcatcaatagtaggcatcaatgagggtgggttatagatggcttattgtcaccgcccgcatcttccagattctatggctatcgacaccggcagaaggaccatgcttattatcactacgcctttcaccatattctggagttcacactggatgcttgaacaccagttcttatcctggcctttctgataggctgaggattcacctcgaattcaaatattcatctcaatctacacgcacctagcacacctagcgcaatgaatctttcactggtcgatccatttgtcctggcgcaggaataccctgataccttgacggagaagctgagtatgtgcgactcatacttctagcaatgaacatcactgactgagccaacatgatataggcagcggccatgcgacatgtttaagcttcaaccacaaaggcgactaccttgcctccggacgagttcgtgaaccccaaaccaaagaatatagcaacctgaagactaatacatgctctaggtagatggcacagtggtgatcttcgatatcgaaactaatggcgtggcgcgcaagttgcaaggccacacgcgacagattcagtctctgaggtataatttccccagattcgacaccgatcgaccgaaacccaaaatgctaactccattcccagctggtctcgcgatggtcgctacctcctcacctcctcccaagactggaaatgtatcctctgggatctcaaagacggctcacgagtccgcacagtccgatttgaagcgccagtatatatcgccgaattacacccattcaaccagtacggcttctacaattcccggatatttcaacaactaactttttctgtctcagcctcctcttcgtcgcctccctcttcgaagaccagccagtactggtagacgtctccagcacaaaaccaatcaaacgaatcctcccctccgcccccctccgaccgcaagccccagacggcgaagaactcgacccggccgtagcggccaaacaagcagcgcaagacgccaagcactcaacatgcgtaactatcttcacggcctttggcaaccacataatagccggcacctcaaaaggctggatcaacataatcgaaacgcaaacctgcacgacaatccactcaatgcgcctctgcaacggggtcgtaatcctcctccggctagccagcaacggacgcgacctcctcgtcaacagctccgaccgagtaatccgcacagtgctgatgccagacctatcacaactggggatcgacctggaaccatccgcgataaaactgcacgtggagcacaagttccaagacgtggtcaaccgactcagctggaaccacgtaacattctcatcgacaggcgagttcgtcactgcgaccacattcatgaacccagatatctacgtgtgggaacgcagacacgggtcgctagtcaagatcctggaggggccgcgggaggaactcggcgtcgtggagtggcacccgagtcgaccgatggttgtggcgtgcgggctggagaccgggtgcatctacacgtggtcgatcgtgtcgccgcagaaatggtcggcgctggcgccggatttcggtgaggtcgaggagaacgtggagtacatggaggcggaggatgaatttgacgttcacccggccgagcaggtgcatcaacgacggctagatcaggaggatgaagagccggatgctatgacgcttgattcggtggagggggacgctgatggcgttgagccgtttaacctacctgtcttgctggatatcgaggacagtgattccggagacgatgtcgttgctgttgggccgggcactatgcggcggaggacgcctgggactagtaaggagggtgccaatggggattcggagaagcctgcggctaatggggcttctaagggtactaccaggagtcggcggcgatagttccttttttgtgtgtctcacttttctttttcccttgcctccgctgttggatggctgtactagcatggttcgcatacggcggcgttcatttcttagggcggagatgactgggcgttgggcttctggttttttttttttcttttggttcttactgtagccaatgaatgtatgacaatgcagccatatcatgatgattaaaaggtctaggtgctactattttaaacagagctgtatttgtatatcttttaagaccggagagagcaataactaatagaaactgccttgacaacataactagctaatggaatctacagctatcaagtacagaaatagagagaaagataagaatacgaagagcgtgttgattccaaagagacatatcgactcatcatttaggtagcaaatggaagtgtcagaaactataggaaggtaataatctgggtatatatatcacaagccgagaagattcgaaatcgaaatcgaaatcgaaatcctggctaaagccgaaaacgccatagatgcaaagtccagcatgcagagaaagagaaaaaaagacacaagagaaataaagggtagagtgagtagagtatagtagaatagaaagaaaaagagactcgagggagccgtgggtgcatagaaagaaaagaaaggaataaaggaagaagaataatcacatacacatcgtgtcagccgtcaatcgcgcaaacacccttgagaagtcagttaaacaatgttcatagtcctgtcggctgttgcgggtggaatctataagggcaacactcttcggggataatatgtctgttctgaacaaaatcataaagctgtgctgaaagtcgttggctccggagcgaacatctagttgcagccccttgcagcagatgcacgttcaacataacgtggcaagtgcatactctgggccagccaaagtctgtgagcggcgacccggtctattttgaattcgatcaaaagcgagtgtagttctcggacaaagccagcactgtcgagatcacctccgatttgaagtactagctacccttcgaccatcatgtgggtaggatccggcttattcctcgacaggttttcgcgcttggtaaatgtgcagaaggttgtatgttttgatcttcttgtcgaacgcttcctgcttgacatcgaatgcaatgcggtcaatctgctccctagaccaagaaagaacccgactgaaaggagccaaacacatcggctggacgctctcggagatagcgagattgtaccagcgcgcgaccttctgctcgtgagaatcggggtgccatgggttcatgggcaaccccacaatctggtggtcgatctcggtgaagcccgcttcttgtaaattcctgatcgtctcgttcgagctgtgggccaggggccgcatagtagcttccgttgcatgcttcaaggtcgagtaccagctagccatagcacgtcccggttcaccatctttgtcctcaacgcggggccggaaatcgatctcgacctgctcaaaccaggcgcccggccggagatgctggaagacccgtcggtagagacttggccaatttgcgacactcccacatcccatctgcatgtggatgatatcccatgaatcctcgcccatggtccagggcgcttcgaagtcgaacggggcgtagaaatcgcagttcttcgggacattggtcggttgtattggcgcaaggtcgacgccgactacgaaggaattcgggtatttgttcgcaatctcgatgctccagatacccgttccacagcccaggtcgagaatcttggacccggtggggtgtggtgcatagagcaagccatcctcggcccgtgcaacggtgaacaatttgtggaatatgtcgagacggtcctgttcttcctcgtcgcacgggagagggtagattcctttccggtagccatggtataaccggccgttctctttgtgaagcgggtatttctcgggtatcctgtgagaagaggtcagtcatagattacacgattgagcatggagtgacatacttgtgatcggagagtatgataggagacgatcgcgacacttgagatgcgttcgaggcgtgggatgcctgtgtggccaccgatccattgctagcaaagcgagcgttcctgcgcggatctttatcgaccggatctctatcgatcaaggtgtacaagtccatcgcggaagacggttgtcgtgatcggactcggtcacttcctgccaaggagtgtgaatagtatctggagtggcctgcatcactcgcggaggttgactcggacttgtaccgtttgggcgggggtggagaatgtatgggtggcaggtgtcgcagcctggcatccccgttcgtaaacattctggcgatgtggggtcagactgtaaggcaatgtgttgctatcggcgatcaatcaatgatggcgcaagatatgtaaggcggtttcagatcgacggatcatgccaggtataaaaataaacaagaataaaagagcaaatcagctgcgcgcggcgaaaagcgcagcgtaagcccacgagcaaatgatgagctcgggttaaacgagaggttccggccgattgcacggtcgggcgaagctcagagattcgagattcccaggaaccgagcacaaatcacaggtcgatgtgcagtctcagatcaggtccaactctatttcctgcaagtcctcagaaagagaagggaagaggagggttttaaggttgtgaagctgtggtttccttcccgtcgggcccacggggatagcggggtgcgggtaaagcgagagaataaaaagaagcagacagggatgaggatagatgaaggggaatgagaagaacttgcagaacttgcagaagtacaaagggaaaagtacgacccgcgctaccggtactggctgttgggttgggtacgggcgtttaaaggatttgttcatgaatagttaggtattgacaattcattattgtacgaaataactatacggataactactagtaatcatattatattacctacctacaacatacaccacaactacaacatatgtagaccttatgcaaggcatcccagagcaatggttgaaggaaggctaaaccaattagggcttggttgatcctggtatagtcttttgctctacttttgcttcttccagttttgcttttgctttctttgcttttgcttcagtatacataattcaactcctcatattcgataccgtaccctccgtacactccgtacccccgtaagagctagatcgacgtggaccaaaaggcgacccacgccctagcgggatgcggaccgtctgggcctctcatttccagggattccacttggtgagggcccaacggagtggtaaaaggcgtcgagttacttatttggtaacttagggtaagcgtggcgctgttacttgctgtactgtattctggtatactatactaggtacactatgtactactacatatgtatcaatatctacatctctgtgccacctcaatacaacatatacctatgccctccgactcgtcatacaagtcatcttaaaagaaccaactcgtacaacgtctgcatggactgatgaatctcccctcaccgcaacccaaagccctgggttcgtggatgccacagtcgagcgaatcaagtgagataccacctcttggcagtaagctgcacctcggggtaatccatggatttattcgtttgtgatatgtaagaatgaccccaagaccactgcactgggtcctgactcgtgtcaagtctgttgtttgatttcctcccaaccctgcaatctatatacatcccctactgatatctgcgttctacgtgtcaacattcccatcaaaacgatagcccaagatgtttcccctttagaccattggcttcccaggccaccggttccaccctggcccgagcgcggatttccgttactactccgtactaataaaacatctcccggccattgttggggatctaccgagtactagccctcttcataggttcctccgtacacagaaatcatcctagcgccggtcaaaccccgagcgcggtgctctccttgcagggtacatcctctgtacgggaatatttcagagtccgtgctgatctttcctgtcattgttcaccagctcgtcatggaggattgatcgaccggcctgcgcaacccacacgcttgggactgacagaccatgggattgggcttcgcaggagtagtgcattgtctcggggggactaacatctagcgtatggagtacgtactttttttgcccctgatttttgaataggagatctttttatttcgtttcacaaagaaagccaaaggattattcttcattctatcgctatattttatattgagtacatgtatgtacatatgtacctagacagattaactagtgaattactccggactccgtaagaactacaggatgtacatcgatgtgatcgtactccgacagatattggccccacgtcccgccagaaaaaaaattctagccaaactccgaacctcatccaaacgaattgattaaatttccacgctaataatacataaaaccaaaaaccagtacacagcacatccatcctcggagataatcgatcactcggaaactaatcgctgcccctcgcatcagccacagcgggatcaccgatcaccccagagatcaaaacatttctatatcaaacccaaaaaatccagccacactgcagacaccgggactagcagctccccgggaattcaacaatgcacaccctcaaagcagtcgcctcatcgactctgtcgctgccggcggataattacatctactccatcgtgccttcggcgccggggacattcgccgccatctcgtcagatgattcgctgcgcatgtttgacgccgccgatctcgatcgcgggtccgtggtctcggctgctagtcacagcggcggcgtgaccgcgctgcgcagcttcgccatgggtgagtcgcacctcttggctacgggtggccgcgatgggaaggtgaaagtttgggatgttcgggctgggaatggcagtccggttgtggagatggaaacgggtgagtttgttccagttaagctttttttttattgttttcttttttggattttatgcattgattgcctctttgggttgtcttcgggaacctgctggcacatgtgcgttttgtgttttggtgctgcatttccgctggtcttttactgggtttcggggaatttttcggcgcttgggtgcaagggtggcgatggcttggttggggttgttgctgctttctgattaaatgcttatttgctaatacattgtcttatatgttagcgaaaaagtcgccggttctgtctgtcgcttgtaacccggagacgaacactattgttgcggggacggaacttgtctcttcgcaggcggttgttgcattctggtatgtttcatctatacctcatttttatttcttaggcccagttttatcatcgataattgcatcgggatatgtcagacaaaaacagctgtgccagacccactaactcacacagggatatccgctccccccaagaattccgcctccaatacgtggagagccacaacgacgatatcaccgaggtaagtgcacctccattaagaatcaagattttaagcccaacccaacatacccaacacctactccaaaccccacatgcagcaccagccagactaaccattacatcggcaccttgcctgttaccggtggtacacagctccaatatcacccgacgcgcagcagcatcttactctccggcagcacggacggcctagtcaacatctacgatacgaccataaccgacgaagacgaagccctagtgcaagtgatcaaccacggctccgtacatcatgccggcttcctgtccgagcgcaccatcttcgctctcagccacgacgagcacttctccgtgtacccagccacggacccagacgatgcctcgcaggagcccgagcccgtgcatttcggtgacgtgcgcgacccgctaggctgcgagtatgttgcgcagctgtgtttcggtgcgcagggaccgtatattgccgctgggaacaagatgtatgtttatttcttgttttgttttgttttggggtttttttgtattcgtgctcggaagacgaagtcggacaggcacacgtgctgttgtgtttggggtttcgtgggctgggctcgtgggtgtttggatttgctaactatgtcttgcagtgacaaccgtctcgatcttgtcccacttatttccagcccgtcgtggaagctagaccgggataatctgtggcgcttgccccgtgctcattgcgaggaggttgtacgctcggtgtatttggatgaacaggtaagttttctaatactaattttcttgttgtgtgttatatctgttggcctgttcttggctttcgttctttataaccctcgctaatgcaattatatcctctagagtcagtccgttttcacctgtggtgaagatggcttcgtgcgagcatggagacctgcagaagagagcgatgctccagtccagtctggttctgcaaaggctcgcccgaaggagaagaagaaggataggttcaagccgtactagtctgtgtactgtgtgcgggtgaatgcatctgctgctgacggttgtctgttgtgtatcgttgggtgtttggggtgggtaaaaatagatctgcaatttgatgatatgagttatgtctttattgtggaattgctgtgcgtagaaaaagttggttgttgggttagtagtctacatgtggtaggttgagatatattactggaccatgacctctgttagggtataatgttgaattgaaccacgtccattccgagcaccaatgagcatgatttatatggttttagctctggttctttttctaaatcacaaatcacaaaaaagaaaccaactttgaattgaagaaaatgccaaaaaggcgcccaggattaagctctatcgaattgtgaacgagattcataattagtaagcataaataaacagtcaatttatccctacacaacctgacccttcaggtgtcgaatcttatctccaacatttttttccgtatcaaaacttttcttgcacaagggaccaacaaccataaatcccctctcctccaattccacaacatacatacatacccaagtcagaatctcacacccaaaaccaaaaaccaaaccaaccttcaaacccattacccacccaaaccctccatccagagcaaacacaagaaccaccaccacaaaatggacgcccaagcctacctaatcaagcacggctggtccggtcccggcaacccgttaaacccaaacaaacgacccggcgcacacagcggcctaggcctaacccgaccactgctcgtctcgcgcaaaaccaacaaccacggcgtgggcaagaagacaaccaaagacccgacgaaccagtggtggctgcgcgggttcgaagacgcgctgaagggcgtcgggaacgacagttttgaggcgacctctgcgcgcgagaacaatgcgctgacgagcgagctttatcggcattttgtgaggggggatgggctggctgggacgcttgaggggaagaaagacgagagcgcgtctacgtctacgtctacctctacgtctgccgcttcctctaagtcaaagcgcaagcgggaaaatgaagacgagggcgagcgcaaggctaggaaactggccaaggctgcgcggaaggtggagaaggcgcagaggaaggaggcgaggcgtgtgaagagggctgcgaaggcggagcggaaggagaagaagattgctgggaagctcgcgaagaaggctttgaaggagaagaagcggactgcttctgaggaggattacccaacgcctaggtctattgaccaggaatctgatctgactggggcggagactacggggacggatgaagctgttgcgcggttagaggagaaggcgacgaaaaaggaaaagaaggagggcaagaagaataagagcataggagataatgggggcgctgaagactcgaaaaagaagtctaaaaaggagaagaaggataagaaggaagctaaggcttgatgtgtccatttcgttgtacgcattttgatattgagcgcttcacatgcatgtcaggaccaggtacaaaattctgcatatacctgtttttctcttacgcctagaaatcaagataccctttttgtttggcgaaatcttgactattgcaaccataggaaatgtagaggtcttttgatttgtgttggagctaagctacgctggtaattttccaggagtacctgatagaatccacggtcgtttctcccagaactcatctttgatgatgtcgacatggtcaaccacgacctgtgctttccggcgcagtttgcggatcttgtcttgctgtgaccttgactgcttagattcgaccaccagtgattcttcgcccgcaggtgattttgtaggctttggttcctctagctcgtactgtagagaaatattagaacggccgaaacagaaagaaacacatataaactaggacatacctggcgataaagaacagtgccctttttatagatctctagctcgttattgtagttaattccaaaccgcttgaagagaatctcgttcttgtcggcggatacagtaccctggtatcaagtcaattgcctgtaattcgaactgaaagaacaatagcatacctttagctcttgctcggcgtctgtattgctcattccgccttgcaacaccattgtccagaaggtagtgttgtagaggttattgatgtgacctagtgatattgagttagccggatgtagtccgaaaagggaattgggagccacttacaatcaacctgtctccagctcatataatcgcggagaatttggttattcgggtagatgaccgcacgcccatcgaaagagggtagatacggtggcaggagaggtctttcggggaagaactcgctccatttgtaaatgtagtgtgctgtgaatgtagagacgatggtggtaactagtttcctggatggaagaggttctatcaatggccgttcttataccactgagatataagcaaagaagaaatactcacccattacgccgctcaaaaagttggcagttgggatgaaagacaaaactgaaggaagactgttagttaatgcaaggatagcgatgaaacgagctggacatacctgaattcgtcactgactccataggcgatacataggtctggaagctctttcatgacctcaactgccgcagcattcatcagatccagtgcccggcggtcattgggtttcgcgaaagcgtagtgatcagagagtctatataggttagactccgaacagaaacgagagcatgaactagaacagcagtcatagcatcatatcttggtgagatatacgcatagaagacggatatatagttgccattttcttcttctatgaagattcctcatgcaaagggcattcccaaataacaagacatggagactcacttgtgaaatcctcgtccatcaatgcggaccacaatccacgtactggggagcagcacgtccggctgctcaaaggacttgacgtactcaaatctgtgttcatttagtagccggactgaaattttctagaatttccagtgcttacctagaatttgccattttaatctactggactttgatgttaagtgatgaatgtccagagattgaaagtgtcattttgtgcgatttctgcccgcccgcatttgccccaactcgaaggttttagaatttgaggacttgaagtgatttgattaggataatgcaataatttcttgtgaagaccagatatactacaatttctagatacatccagatgactatgtaaaatcaaaaatccgcaaataaaactaatatgttgttgagatgcatatcaaaaaccttcagggaggatgcttaagaatctaggaaatgaaagtgaaaggacaaaccaagatggtctatagataatgtgagatacatgtgagaatcatgaattctcaatctcaggaatctcttcatcgccagcttcactggctcgctcgctagtctcgctggccttgtcagacttgcgagacttacgagaaaagaatcccaagctgctgcgggttgagcgatcggcggaggtcacacttgagacagtgctatcgacactcttgccgagctgcgcttcgctggtggcatcctcgtcaatatcaccttgcgaggattcacctttcttagagaaaagtcccgagcgatccttccaggagctgaacttgctggaactacccttgcgcgtgatcttgcgaatgaacgactccttggaggcattgtccaaggaagtagcagatggcatgcgctccaacgattcataggaatcgccagtgaaaagggatacggagcgagatgtgcgagactccgaaggagatccatcgaaatcgtgaagaccaaagggactttcgggatcattgcccttgtctgtgtctatttccgacttctcgcccgtgagaacggccgtgaatgccggagcagcaggattcagctttggggtcagcggtcgatgagaagacgacggacgagtgccaatcggtgcctggagcggtcgatgatgacggtcaaatgtgtcccccacgaaatcaggctcgccggttagaccgagaggaaggtgtccggacgatccatactggattgaaggtcggcgagaaggagctcgagaccaattggatggcgcggcccagtcaaacccgagcgggctgttgcggtgcccagcattatcagtcgatggccacccgaaatggcggttgtccgtcgaggggtgtggaagttgatttggtgtatcgaatgaggtcgacgaaggtcgcggggacagagaaccgcgccgaacgccaccaagaagcgatgatggatcaataggatcatgtcgcggactgaattgattgtatccactgctaagatcgggatccccacgggtgccagcaccgccgaagccaaacttgctggatgagaatatatttgagaaagcagctcgccgagagggcgcatggtcagaagagctgtccatagtgacaccagtcgtgttgcttcgagggaacaatgacattgggtttgcccagttaccggtatagctcgatcgccgccggcgtgcaccgattggatccagctcgtcaatattccgagggaaggattgactctgaccgggtttcaaagatcccagcataggagactcatctgccagggttttcccacgaggccggtgaaacccgaaaagaccagaaagctttcgcgatgcgcttttcggggcttccccagcagtagacaaatgagcaccttgggattcatcccgccgattttgagtctctagtgggctggcaaagatactgccggctcgactgtccgaagagacaggcgatgctgggccgtgaccgaagctatctaaagtagtactggtcgcctccatggttgcaaatctgggacgaattatagaccgtgggaattctggcgattcctcgtcaccaaggagatcggatggcaacagggcatccgcacggggactcatttgcgggttattgaaagcaagttccgtatccgagcgcatgatctcagggggatcagagaggcctgtaagggccataccgttattgatattgaaaaacgcagagctcggagggaatgtaggcgagtgaccggacgggttgtagttgacgctatttgaaaacgaggtttcgactgccgggaagttcagaggggaagacatattgctgttgagtgagctgcgatggcgacggggccgaatggtggcaatattcgacatgtcgagatccaaggtcgggaaggcaaagggccctgagctgccgggtcgttgggcagtgagccactttagacgttcttgggcttcttgatattgttgctgggcttgcgcgtgcagattcacaagtgtggcataacgtgcgtgtaggttgcccagcttgtgctcccactgacgagctcgctcgttgtcgatccgatccagctccttgccatcttcactatcgccttcttgtaatcccattctttcttcttcgagcttcttgacccgtcctcctttatcctggatctcatcgtcaatggtcttcatctccgcctgttcttttgcgatcttggctcggacctcatctgcgcgcaccgccccttcttcttcaattctggccttgtcatcctttgcctgtatagcatcggagttcatgcgtgaaatcttctcctgccatcgcaagatgtcattcttgcgcttcttgcgctccgcctctttctgctgaaggagtctcatgcgttttgacttttcgccctgtacagttcggttgacgctctcgagcttgtagacatgctttttcaaatcgccacttgcttcatccttctccctgacgcgcttccgcagttcactgcgctgtttttcaagatccttcagcagtgcaatatgctcttcttcctcctctgccccctgcttttccacattctcgttctcgtgctgcaatgacttcaagcggtctgccaattgctccaaagtctcatccttggcagttctggctctgcttttgagtgtctcttcgaaattcccgtgtgaaacgtccccagtcgcaggtgaaattttccgtccggccgagggccgtttccccggtaattggcctgcgctatgctcacgagacattatcggggcggatggcgtcggcagacctactgtagacctggggatcgatgcgcggataattggacccccggcgctgccattctgctgggcttcggacagcggaagagattttgttcggacatggaggatcgcactgggcgtgtggaagtttgcggcactaacggaaagaacacaaatatgatagatgttacccggcaatagatttgatatttccacagctgtttctgctcgtttggattcaccgactagagactgttagtgctttgtttagcgacaagaagggattgtatgtcttatacctttcgtgttattcacttgaattatatgcttatgtattgagttatgaaagtcgggctgtttccaagcaagacggatttcacgggctgtgatctcttcgagggtgacctctggcggcggaggaatgtcgagaccgagtttctcaactaagacctcatttgaagtctggcagacttgccaggcacggtagagaagccttgataaattgagtcagctgagcaaagggaatgctggaacaaccaagggacttaccagatcaaagcccacaagatcgagacggcgagaaagagggccatgacgcctcgcactctcacgcgagggaccactgctgggtaagcgtcaaatgcaaagtataggggctcatacatcccaacgtctgtaacccattggacgtgggcagcgggatacaggagaattgcaaggatcgccaatgctctccggagtgggtgggataggcacgtgacccggaatattagccacccaaaataggttagcgccacagcggagatcagccgctacggcatagaccgcttaaacggagtacggcctctatactttgacggtatgatttacagcagttgcaatttcatgattataatttgtccgatatcttaatattttgagtatattttggatatttgaggtatcttttgagatgtctttttagctgtttgcttaatttatctagaatgccttctagatgccttctcagttccaacccgtggaacggctgtgtgagcttccatatgtaagcatcgtctcatagcaatatcgtggcgtgctattaaggattttgcctagatgatggttttatgttgtcatttgccacttaagaaagaaacctcaagcctatgttgtacactctataaatacgtgtctatagttcgcgtgtatataccaaaccttgaatctactaagacgattatgttatatcaagaggttcttccttctacaactccaacatacgagtataagggaatccaggattctccagatcctagaccgggagctggaggatttatctaacccttatattgtctttattattgatgagcgttccttccttgattgttttgagaatttcgaagaaggactacttagaacatcatgggatacctacgacccttctagcaaccgtcttgttgttaggaagcagaccataacacattcatctgcaagcggttcttttgccagcatatttagttcttggcctaaagacgacaattaccgacttatatcaaagcatcagtgagaggccagtcggagatgaataaacaggaggattactcatggaccctatacaattaggccgcttgaaggaatctccgactatggtagtcgaaatcgcgtgggcagaaacacggacaaagcttgtggaagatatgaacttttggctatcctagtgttatggagaagttaggatcgcactctcaatcacagtgcatgctcgtggaaagatcacgattgagaaatgggagcttcaaggcgcgactcctattcccacccagaaaatggagatcgtatgaaaacccgcaccaaaatgcgagaggatccaaggccacctccacctcgctcttgaagatattaatcttcaaccgaaaggggaaaaagacacagatttcatcctgacaccccgcgatatggaaacacttgcaaccggggtttgggcttttcagtttgatacttgagcttccgcgggacaactggttccgcgttccgaggttgtccgcctgctccaagtgtcacatggttcagttcaacttccccgattctccaacaacttggtctcagtcttcttctttttgtccctctgcatttctagaatttgcttcggattggaaaacttcactcccagctgtcaaaggtgctagacacccatttggcgggatgcagctctatcgctctataagcggttctgtctccaagacatggaattctatcaatccggccactcttagcggggctattgatgtcattgtcatagagcaagaagatggtatttacagttccccgagaggcgaaattcacgataactgatttggcttttctcttcaaggcaccctcgcttgttcgccctttcatgtccggtttggcaagttttcgctattacgtccattcgagaagaaggtggagttcaacgtgaacgggataaaacaagaatatgccatgaaattaggagagggcggcgaggcattctttatctttgaaacgaccgatgacatccccgcatccttgcagacctcgccgttggtatctccagcagccagtccaagagcccagagcgaaccggatcttctaccttcgctgcaggaaccagattaccttgacctagataaagaaagcggggatgcattgtcggaaggcgcaaagaccccgccggcgatggggatgccgttacgggcaaatacggacatgggtaagacacatctccaacacttagtttcgatctaagtccctcgactgaccgtttcaatagggacaataacacccttatcgccatctctcgatgaatccaacgtggcccgttcacggcacggttcgttgagcgataaaccgctgcttgatcatacactctcggaaaacgtgctctcgaccagctctcctcaacaatctctctccggccaatctgcaaatgggaatgatgaacctcgtgatattgatatcgagggcgaaacacagcgccctcgtagtcctcctctgtctgcccaggaagcggtctctcgtgcaatttcgctttcaaagaagctgtctgggtctaatattccatcacatgtcaccgagaccggagatctaatgttggatatgactggctacaaaagcaacgaagaagatgcccttcgcgcggaggttgttgcacgcaagatccttgcagaagagcttgaaggaagctatgatatcggtgcactgattggagccgatgaacatggtaatctatggatatacagcagcgaagagtccaaggaaatggccgatcggagagccactcttcactccatgcgaccaaacatagcgatgagcgatgatgctctctccgacccaggatatcatagcgaaggcgaaaacgctgttttggaaccagcattgactacgcgccatcatcgaaccaaatcagatgttcaacccggctttcccacacccccagattcacctttgcatgagtcttaccccattgaaacccgcaactatgccaaaacacttcgcttgacaagtgatcaacttaaggccttggaactgaagcccggcgccaacacaatgtctttcagcgtcaacagagcaatttgcactgcaaacatgtatctgtggaatggcaataccccgatcgtgatttctgatattgatggaactatcaccaaatcagatgcgttgggacatgttctcaatatgatcggacgcgattggacgcatacgggggttgccaagttgtacaccgacattgccaacaatgggtataatattatgtatcttacaagtcggtctgtaggccagactgatactacacgagcctatcttcacggcatttgccaagatggatacagactaccaagaggtcctgtgatctgcagccccgatcgcacgatggccgctctgcggcgggagatctacttgagaaaacccgaagttttcaagatggcatgtttgcgggatattctcaacctcttctgcggcaaagagaatcccttttatgctggcttcggaaatcgattaacagacgcattgagttatcgttctgtgaacattccgtctactcggattttcacaatcaactctaatgctgaagtgtctctggatttgcttagtctgaataagtacaagagcagttatgtgaccatgcaagagctgctcgaccatttctttccaccaaccagccttcttgtacacgacggtggcgaggaatatacggacttcacatactggagaaacacaccgcatgagattgcagacttctcgtcaacagatagcgaggatgaagacgaggaagatgtcgaagaagaactagccgaagaagaagaggaagaagaggaagaggaggaagaagaagactacgatgaagaattgagcgagggtgaaggcagcgagtaccttgatgaggctgagttggccgagggcgatctcggcgcaagctacatctcgcaggactccgttgccttgtccaaccaagcagcctcaataattgaggcagtggaaggcgatataggtgccgaagagggggctatcggtgaagaggaattgtctcccgtcatcgagaaagcacaagaaacaaccgaaccgagcacaaccgaacttcccatccggtccaagatgccgcaaaatctttgaacatacacccaccactatgtttttgctaaggcatcgatccctgggcatttcttgcgtcatagatacccgtctgcgagtgctttactgagtcagattctgcattagacttccctgacagcgatatatccacgttcaacactatttcatgcagacatggagttggggactacattatacacggccgctcgtgcccgactctttttagttcatggcgtttctccatttgtttttggtacattcatggcgcacatacataggatcatgagaatgggatgtaatgaatggaacaagtgaatagtcttgctcaaacacaatgaagagcctgatatattatccgagggtgatctacaatctaatatagtaaaagcattatgtagatttgaccgtttgttaaagtgatttagttcacttgtgactgcaggcaggcgacgcgattacctaagcgtgatattggctgagccctggagctcatgtttcttttcggcctcatttggccatcacttactctctctccatcacacattaaacgctacttgcatctttggctgtttcctagcctctgagaattgtaccaggaatgctgcccgactacatttcccaggccgtctaatcatcacataattcaacatcttgaccactttcgcaacagtgcaattcgctctttctttcctacttgatctttgatcagcaatccaagataaaatggcatccccaagccaaccacagggccaagcacccaccacacaacctctcacaccacccgccgaatcctccgccacgaacgggacctccgcgcccgccgcaacaagctcccacacccaaccccatgtcccagcaacgggcgcttcaacaacagcaccacaaccgcctgcagtccccgggatatcaacccaggacagcggaaaaacgcgacgaccaagggacgtgcggctggtccacatgctcctcgcctcactcggagtaacctcataccaagaccgggtgcccctccaattgctcgacttcgcctaccgctacactgctaatgtgctacaagactccgtgcacctcgcaacggaaggatacgccgcggcaacagacggtaccgcgggcgcaaagggctccggcgaagtaaatagtgtttctctgcccgcgttgcggctggccattgcctcccgcttgcacttccagttccagacagggttgccgaaggagttcctcatggaggttgcgtcggagaggaatcgtatcgctttgcctggtgtatcgcggggattcgatcctgctgctggtgttaatggcgctgttcctgcggcgaatcagagtgttcttattggtggcatgcgcttgcctcctgagcgcttctgtcttactggaatggggtgggatttgaaggaggagtgggatagtgagggcgaggaagatgaagtgcttgatgtgatgcaccagcctgggactgggaagggctttggtggtgatggagctgaagataatgaagacgaggatgataatgatggcaagatggaggatctcttcggcgaagataccaccatgggcgaggcaggggatggagatgaggaccggaagatgactgatgtttaagggagtgcatttacgtcaggggcttcttctgtctttggtctcgggctggtggtgtttctggcgcttggtgttgttctcatttttctctctaatctgccatcggacagggtcctggttgtactatcacggagagcatctatttcatgacttgtgtctacaaattggggtaaaagtcccctcgcctgaccatagaggcaaataaaccgataaagaagacaactttcggtcaattaaaccaagatatgcaatcgtctgtgtatattgtacataatttccatcccatcgctccgcattcgggatgatcatgcaatgtaataaagatgcccagcaaaacgcctgctttgtttgcctgtgtgcgccgtgaggagagagagaaagatataaggtccgagtccgagttagccaggaaagtccagggccgacatccccggcgggatcagtctgatatctgtccatcaaaccgatgacgggtagcaggccgggaggggctgccggactgtaacatgcaagacccagccaatcaggcagtcaggccaggaagagtccaacagctctttccccctcgcccaaacactcagcccaaagaggaaaatcctcgcatcccgacctcggagaaacgcaagaagcagaatactcaagacgccgaaacccatataaacaagaaatactcacacaagaaatgaagagaacgggggcgggagggatacatggagtaaataggaagagctccaatcatttttccgccgctcgtgtccgcgcctcatcctcgcgcatcatgcgaataacttccgcacgacgcttctcaacccgtgcaagatcatcctcacgcgcgcgtcgccgttcctcataccccgcgaaccactcctcacgtgcgcgatcctcttcttccggcttcgcgtgggcgaccatgcatgaattcattgcgagacgttgctggcggcagacccatgttgcagtgacagtgcggttgacggcgcactcggcaaatgctatatcatagttgggttagttggttgtttcagacatgttcgaggtgtggggagtggatcatggtcatgcgagccggagttgcttctccgcttgaaactcatgaccggcttctgcaagctcaagctatgcactatttggaaagaggtgatgtatttggcgtaggaagcaacgtgaattgtatacctttaatttcgggtgcgcaatgggcgcgtactcgcttgtagtacagcagtttcacttcttgttcttggggggctgagagcggaagcggattgcgaagattatattttttgggtgcacttgttgaagaggtatcgggggatgtggaagacgtagccattgggactgtagatcgatctcaagatcgaaattgacggggctgagtgtatggactggtcgaccggagagtttgctttgagggggattggtcccggttgttgagggacaagatatgagttcggctgctccggagcctaataaaacgaatcgaagaggtagaagtagtttcaagaggggttcatcgaatggctttacagagaagatcgaggctaggtgggagtgttgattgcgagtgagccgagctcgggcggagagaatgttagttactattggcagaatcagaaaaaaaagttctccgactttgcatctcgatacaactcttctgttagagacatctgcgtcttttcgctctttgcgtttttgtttcttctacactttcttgtgctctatttattgtctcgggaattatcaacatcaaaactcagcatgtcgtccatgcgcaacgccgtccaacggcggaaccacaaagagcgtggccagctccagggccgcgagaaatggggtcttctcgagaagcacaaggttagttcctgagaaggaggtcttggaatattttaccaatgattcaagctttctctcatgcgtagttttaagacaaacattctaacttcaataggattactcgctccgtgccaaagattacaatgccaagaaggctaagctgaagcgcctcgaagagaaggtgcgggatcgcaaccccgatgagttcgccttcggtatgatgggagagaagaaccggacccagggtcggcacggacgtggcaaaggcacagcacgagactctgccgcagcgcagggactgagccacgaggcaatcaagctgctcaagacgcaagataagggttatcttcggacggttggcgagcgggtacgccgcgagattgagcgcctggagcgcgacgtgaaattgcaagatggcatgaacaaggtccttggcaaaaaggatgggaaaaaggacgagagcgacgatgacgggtttgacgacgactccgatttcgatttcggggcgccggtgcaatcgaaaccaaccagggtggtgtttgccgatgatagacaagaccaactggcaatgaagaagcagaagatacaaaaagaagaacctgcgctagattcagaggaagaagagcagacgtcaagcaagacccgcaagacacctaagcagcttgaggctgagcggcaagcacttgtggatgctcggcgggctcgcaagctccggaaacgagccatcgaggcccgacacaacaagctgactgcgttgcacaagcagtacgccgagattcggaccgcagagcaagagcttgattggcagcgggctaagatggaaaattccgtgggaggcaccaacagggacggaatcaagtggaagatccgtgagcgcaagcgctaagtgtttttagtgttttcgtttcgacggagtttatgagtgatgactgcttatcatcttttttgtacatattgataccaaccaccatagaggcagtccggcgcatacagtagcatccaaggaacccacttcagtcttggccatcgactcctggaaaagctcgataacatcaagcctgtctcaggcattagctggaaaactcgtgacaagacatcgccgcttatacgggtagatttgaccatcatatcctggctatatctacatctaggtgtggttagttgttgaagtaatatcaacaggttctctttttgtccttctgtccttctgtgttaaattctgaatgaatgtctatacacattccacaaagggtccaattctgtactccctacaaaccatcaaggaacatcatgaccgatatagctatctcttgagcgagtctcatacagcaggcttacaacgtgttccgctgaagcgggcaatatgtgtggtctcattaccgcctagttcaattccatccaatttcaacatcatttgcgcatgtactgtattgctcggcttcttacattcaagctcccgcttcttgatatcagctgtctctgaaaagggccgtttgtgaatcgaggtttggtccagtgatcgggatgcgccttgagaagcgtttctttttctcttaggtctatcttcaaggacagcctcctctgaggaattaggtcgaccgagtgattcatattggtgactcttgactcaaattcaattcacgattccatcttaacattggagtatcgagtgcgtctgaactgccgagtccggattgagatgaattgaagcgatcaacatcaggtttatctgagatgctttgtctcaacgtgagtgttctccgggtggagctctagttgtggcgaactatagaaggatgagacatatgcagctatgtacatgtggagtaaacccgaaaagaccatgtgtatactgcaactgcaaacaaagggatagagggaatgaacgctaaatcaagtccaacatcccttgccatatgtgtaggcgggtgcgattgcctacttaggaagaagagtcggtataggctggtcatgtgatggagccttcacagtgtgccatttctaagattaacgccacgattgctaagcgttgtctctgactggcatcggaatgatataaagtgtactccgagactccgttgtcgcaagagttctaaaaccttcaagtaatcacgccttcgctgataggacaatctctttaactaatcgacaagccctggagggcatccacaaggcttaataatcatttgccacccctccaaagaaggttatcttctccagatctttttcttttctgcacttcatatctcaaaataaaattcacaatggctccttcatttatgaccattgacaccaacgacatggacgtggatttctcctcgcccaagccaatccacgcaaagcgcaccctcctcctggcacccccctccatcgccactcacgaggacaaactccgcggcctcttcaacaccttcgaccgctcaaccacagacctccaaatgctcgaccggctctctacaggcgtcgtctcccttcccgcaacaacatacgacctcgtcctcatcctcaccgacacagacggcgcacggcgctccgaggcgctgcaactcctcactcgaaatgtatacgccaccctcgtccccgccatgaaggccggtgccaagttgcaaacccaagactcagcccttaatgcctcggacgccatggaggccgtcctggccggcctcgtgcagtccgataatggcttcgagaaaccaaagtttgagccctccgccgctgtccctttaaagttcggtctcaggaagaagaataagcctaccccgccaaccgcagtccctattattcccacaggattcggtgcgccgatggggattgacgcgcccgcgactaatcacgaccgcgacgatgacgacgagctcattaatgaagatacgctcctctccgaggaagatttaacaagacccataatgccgcgtatgtcactcccttccaaccatttcatttctacaagacctatatcatctaacaccatcctcttcagccccagagtgccaacccaagaccggtcgccgacgacgcgcctgcaaagattgcacatgtggtctagccgacaagctcgaggcggaggataaagagcgccgtgcaaacgcagataaacaattgaacgtgatgaagctggatacgggcgacctgaccgagctggacttcaccgttgagggcaagactggttcttgtggaagctgtgctctgggcgatgccttccgctgtgacggttgtccttacatgggtcttcctgcctttaagccgggccaggaagtccagatcctgaatgatattgcgcagttttgagatatactccctatttcacgactgtggggttcccttttttttttttgaagtgggggtcttcggtctttgcatttctttgagcattcttttcgggatttgttttttttttttgggttggttttatacaaaattatgctaggggcgtctggctttcattaatttgaatgattttttttactagtactatgagtactatctaatcatgactcacctgaagatttcgaccgagtggatccccaacgtcatgtcttagatctgatagtgggatagatcggcctagtatacagatgtgccgttagtctgccgataattaatttactttactttatttacttgatatattctaatgattggctgtaataatcaattctaaacccaatggcgactaatttgcattttaatgtatctgtgttcatgccacgtccaatcatgatagaaccgaaaagagaacgtaacccaaaaaatatgtcttatctgacctatgactgattcttcttcatgtgggcaacacggatgctgacggcacgcttgtgtgcctccaggccctcgacagcggcgagagtctctaccgtcttggcgagaccgagcaggccgtcggcagtgaggttcgagctagtgatgtgcttcaggaaggagccgaggttgacaccagagtactgcttggcgtagccgtaagtagctggagagggatatgttagcaagattcaattaggatataagggaaaaagtcgttgctgagaaatacttacggagcgagtggttgactccggcggagtaatcgccaacactctcgggggtccagtggccgataaagacactgccggcgttctggacatccttgacaatagactcggcgttctcgacctgcaggatcaggtgctcgggcgcgtagtcgttgctgagggtcatagcctcctcgatgtcacgcacgacgaaggtgacggagtgcgcgagcgagccgcgaacgatatccatgcggggcaaggccttggcctgggcatcgacctcgtcttcgatggcacgcagctcggcctcgtttaggccggccgcgatgaggattacttgtgagtcgatgccgtgttcggcttggctgagaaggtccgatgcaacaaaggccgggacggcggtcttgtcggcgatcacgaggacttcactgggaccggcgggcatgtcgatgctgacgcctgcggaggtgtcgttggaaacgaacatctttgcggccgtcacgaactggttacccggaccaagaatcttgtcgaccttagtgatgctctcggtaccgtaggccatggcggccacggcctgggcaccaccggccaagacgatgctttcagcgccaaccttgtgggcgacgtagacaatctcgggagagatgctgccgtcggatcggggaggcgaggccaggacaatcttgctgcagcctgctacttgggcgggaacacccagcatcatggcagtggagggcagcacagcggtaccgccggggatgtacaaaccaacacgctcgatggggcgcgagaagcgagagcagacgacaccgggcatggtctccatctggagggtttcgttgcttcccatctgcgcggagtggaagcgttcgatgttgccaatgctgatatcaattgcctcctgaacatcaggggacagcttcatgagttcagcggggaacggcgcatgaataacgggggaggtaagtgatgtagcgtgctcgaacttgtgggtgtatttgagcactgcggcgtcgccgccatcacggacatcgtggatgattggcttcaccaggttgacaatggcttcgttagatttctgagaaggacgcttgaggtaatcggtgaccacctgaggagtagtagaagcagtgatgacacgcttcatctcaattcgggttgtgcgatcctcgaccggggcaggggcaggggcaggggcaggggcaggggcagactcgggcttggccaggccagccttttcagcccaaggtcccttggcgtcgccctttctccgcttcaccttcaagctcttgaggtcaaggttgcgctcgatatcctccaggctaacaccggcagcagtgcacttggttagggcgaagtagaacaggtcagccgcctcgaaagcaatctcatccttggtctccgcacggcacaattcatcagcttcctccatgatcttagcatcgatgagcttaggttcattgaataaacgcgcggtgtatgatccagccggagcatccgccttgcgggcatccaaagtcttttggagacgagacagaccggaagatgcgccgaagcaggtctctgtaccaaggtggcagaatcctaatgagtcaccacgattagtatacgaacatcatccattagtgtaggtagctggttcttaccacgtccaatttgcttgacgacaaagaccaagcagtcggcatcacaatcgaagccaatgcggatcaactcttgcacatccccgctggactggcccttataccacagaccacgcttccggctctggtaaacaccggtgccagtacgcaaggcctcaacaatgctctcatcactgctccaaacaaagcctagacaagctccccgctcatcagtgacagaagtggcatacaagccattggcctggtcagtaacagcggccgacgcgataagcttagcggcagaaacctggccagccacatcccgctcaacggtcaatgcctgtgaggggacaatagcaatcgcgccctgctttgtgacgtttgtaatggcatcctccgacactgtctgagaaccgaaaattgtgaagagccgtggggagtccgagctaatcttcaatttctcggcggcggcgaggacggtggaaggtgtagtgcagacgctagcttcgctgcgctcggcattgacggcgattgattgctggaaagtatccaattgggagtctgacagggcgttgacaagcagacgggaagagggcacggattgttcttcggagagggtggtcagttgatccaagttgatcaagatcttagcggcaccggcgttgaggatatcgacgagatcgccggtggaggagatctcagttgcatcgacgaagatatcgagggcgcggaagttctggcgcaaaaattgctctgcctcggcgagagtcgcgactttgatcagtacgcggccgaagtaggcgatctgcttgagcgagagtccggagccggaggtgggggaggaggggtcgtgggagataaggaacggggtcgccatgatgaggtagatgtagtagttaaggatcaaaagattgaaggggagaattatatcccctaaataataggaccctttgaattaataggggagggggggattgtggaggagagcgatgactcccatccaaggttgtgctaccttttttttttcccggcccgcacccgctgaatcatcgtttgattacatccaactcgacttatcgtgggattttattggtgatcttattttgtgatctataacattttgatctaccgtgttcattgcattttgcattttcacattctataacagatttccattcatgaggtccctggaccatgcctgccttaactatgagccatctcatagacaacgtgatacacagaggtttcactattccggtgatcttgaaacccttgagatatggaatctctcctaaggaaaacttcagccttgggcttttgggtgatcaaaaagcggcctcccgagaacaatgtcagccatgctgtaatagcgcctgtctcctcccgcgatattactgtattcgcccacgggtgtttctcccagtcctgtgttgaaagttggacatatgccatggcgatattgctttttgaggacacgactcaccacctcagatcagtcctgccacagtggtcacctttgtgtctcctaacccggtgacttctacaacaaaattgcacccgagtatggctccattgccaagcatttacatcaacgcattggactacagagcatgagccacatgggtcgaaagacacggaggatcggattatatccgttgggttttgtgccacatgcgacatctttggcttacaatatcagatgcaagatcccgaagcatcaaaagagaacaggtaagacgaggtgaatcacggatacgtgcagctccatttgggagtatctccgctagtcaagttgacacctcgaatattccacaccgaagatgggcaggcttaagcgtaagccattcaacccccaggaagtacaattcagtctgcattcttaccaaccctcaccggtcataacagctcccaatctggcaattgccattgaggtgccgtgcagtttaactttacattatccctgcccctgcacgagtaccttgccaatagctgcaactgtgagatctgcaagaaaaacggctacttgctcgtgtacacctgcatcaagggttatcattaaaggcgatgatatgctaaaagatcatcacttttccgagcgcaagatgaagcagtgcggaggtagttgcttcatctgttttccgagaacagggattccaccaattacccccgttaatataagttgaacggccaatgttatgttgccaagtatactagctacggctactgcaggactttgacatcgagaaacctgattctcaaccagagtgcaaagtcttttatattagttattttactgatgctacccaggtatgatgctatggatgattgtaaattgatgacttaacttagcaccgcctagcgtagaaatgacagcagagggcatatgttacaactaagcgatatatatcacgctttggaaatttatccggtgctaagaaggatagatgccagggtatggtgttcaatagccggtacatgttgtattctcgaccgatatctccgaactacatgagacaagtggttggagttcgaatgcacaatccatcggcacggacctgtatgatcgacataaatgttccttggttggatctaagtccatcaggatctccctcaaaacgtggagaaggtgacatagacatatattgacggggtcagacactctagtccggtgacaaagcccatcacgctgaggggtatgttgcatgtcaaagcggcgtgacaggacgtgctcttccttagccaagaccgtgctagtcaggtacatcctagatgccatggatatgaacctccgaagacagcgtcatgttttctcgtcacgccaagcggtcgtctggcttggtcacccgtatagttctctagaatctgagtcaaggtcgatctagaacattgaatactcgagtatatctacaaagcaacaactcagttatgtgaaaactgagaccaaagatacttcggcctcttacattctccgatgccaatagtgggtggcgtccttgcagatcccccatgcccctggatcttcaaagtccgattggacccttttatttggcaggaatggcatctaatgcacaattcccgactatttcccgattttatggagatctgcaagtgacatgaggaatagtaaacaaattgggggtcgcgtgtgggtgtctgcccgcgtgctgccttcctctttcgcctggcctctgtcttgtcaactgcaacctcactatatcctcattccgcactcccatcatatttaagaattgcattgacctgctgtgtcgcagttcaggtggtctctcgtttgcaattcaaattattcttacatgtgcccccctgcaccgaatcttgcctaaataaacccgtatatctatacccaaccacatccacttcgtaatcatgcgcatctcctctctatcactacctttgatgctgggcctggctgggtcttctgccgcctatcctcaccctgagccagaggtgatcttgccccgccagtcggacagccagaccaaggccgatgctgtcaaggaagccttccaacatgcatggaatggatatgtcaaatatgctttccctcatgacgagttgcaccccgtgagcaatggttatggtgactccaggtgaacatgtccgattatccagttcttgctgtgaaactgacacgcgataggaatggatggggagcctccgctgtcgatgcgctttcaaccgccattgtcatgggtaaccaggatgctgttcagaagatcctggaccacatcgagactattgacttctcgaagacctcggaccaggtcagcctgtttgagactactatccgatatcttgctggcatgttgtccggctatgatttgctcaagggtcctgcatccaatcttgcccctaagtcagctcaagtcgatgccctgcttacccagtccaagaaactcgcggatgtcttgaagtttgcctttgatacaccattcggtgttccctacaataaccttaacatcagttccaagggaaatgatggctcgaccaccaatggtcttgcagtaactggaactctggtgctggagtggacccggttgtctgatttaactggcgatgatgagtatgccaagataagccagaaggcccagtcgtaccttttgaaccctcagccatcaagcggagagccattccctggcctggtgggaagcaacatcaacatctccaacggccatttcaccgacggtgctgtcacttggaacggcggcgacgactcgttctacgagtacctgatcaagatgttcgtgtacgaccccaagcggttcgagtcatacaaggaccgctgggtcctcgcagccgagtccacaatcaaaaacctccagtcgcaccccgcccctcgcccggaagtgacttggttggcctcatataataacggccagtatgatcttagctcgcagcacctgacctgcttcgatggcggcagttttatcctgggcggcaccgtgctggatcggcaagactttatcgatttcggcttgcagctcgtaaatggctgtgaggctacttacaaccagaccctgaccggcattggaccagactcgtggggctgggacccgacgaaagtgccatctgaccaaaaggatttctacgagaaggccgggttctacatcaacagcggctcgtatgacttgcgccctgaagtgatcgagagtttctactacgcgtaccgcgtcacagggaaagaaatcgtgggtcattctcccttccactgatgttctaatatactgactcatatagtaccgcgactgggtgtggaacagtttcaaggcgattaatgctacctgccgaactgactcgggctttgctgctgtgagcaacgtgaatacagctggcggtggctcaaagtacgataatgaggagagcttcctctttgctgaagtcctgaaatatgcataccttgtacatgccgagggtaagttgctagtcttcccagtcacccttctttttttcaaacattgctaatcctgggttctggtatagatgccccatggcaagttcagaagggccagaagaattcctttgtgtacaataccgaggctcatcccatgagagtgtcccacacctagttcatacgagagttgggctatcactacagtatatagtgcatgcatcaagcctttattatcctttgtcattggatttagtactgcaaagaaagacaatttgtagccttctaaaccatagtaatactgaaaactaaagccttcaattcagacggttctccaatctggcagagtacagtaaaaacacaagtgccccgtgctacacttcagctccattggacattttataaacgtcaaataaaaaatggcgcccgatattgatacttgagtctgataagtaatctatactttatatcgagatgagcaattaatagttggacgcacaccatttggttgaacttaccgacttgcctgccaaaagaggggaaagacaacattggtcattgcatattgattctgggcctgtttaggatatatgtttcttatgaattggccagtcaacgaagagttctagctcggctacacgatatgattgcgccattttcagaaccggtgacacaatagctcgctagagaatgaatttctataaaacaggccataacacacctaggcaagacacaatgatgctatccgcaaagaatatcgcgaacacgctaaattactagtagacgccagagaagaatctccattaccgtgtataagatggcgatgcaattctcttcgaatacagtaaatagtagaaagcaattgatcgcaacaaacctacatatcacctacagccatggctctcctaaaacaaactctcctagcagcactagcgacaacctcactacaccaaagcaacgaccactaccgctcacgacccgacctcgcaccaccgcagttaaacatcaccatccccgccgcaaacccgaatggctccgaatatgttttcatcgccccgtactccgtggacgggacactagaacggcccggcccgtacatctaccgcaaagacggcgacttggtgtgggccggcacaggctactacgccggattcgtggcgaatttccatcctacaacgtaccaggggaaacctgttctccaggccttccagggtagtattgatggtgcgcatggtgaagggtttgggcagcatgtcctgctcgatcagagttatcagcacgttgccacctcgactgccgcgaatcatcgtgtttcgtcgattcatgagttcaatgttatccgcggagagacggctttgattgaggtcttctatacgactccggtgaatttgtcggcttatggtgggaattcttcgcaggtgtggttggggaatgggattttccaagaaaatgatattgccactgggaagttggtctttgagtggaatgctttggaacacgttgatccttctggtaagataatttgcctgactttataaagatcatatctaaccgtcgactagaaagtctagtgccactgggctccaaatatgctaataacggactgtcgtccgccgaagcatgggattacttccacattaacagcctcgacaaaaacgaagaaggcgactacctgctctcgtcccgacacacgagcacgatctacaagatcaacggcacagacggctcaatcatctggcggctcggcggcaaatatcccagcttctcacaaatcggcaactggaccttcggattccaacaccacgcccgctggcaaccgcaaccaagccagctggggacggaggtaatctcgttctttgataactccggcgacggcactatcacattcaacgatgtatcccgggcattggttatccagataaaccacacagacagcacggcgacggttctccgcaaagcaacagcaccttatgatctccaggcccaatcccagggcaatacgcagctgctttctgacgaccgaatcttcgtcaactggggttcggagggtgctttcacggaattcggtgctgataatgagattctttaccatgcccttatcgaaacgggggcggtcagctaccgtggtttcctggggaactggactgcgacgccgaaggaaagtccggcgctggttgcgctgaaaacggcttcgaatcttgtggagctttatgtttcttggaatggggataccgagactgcggcttggagattcttttatgtcaacgggcaggagaagacgcgggttggtcaagtggataggaactccttcgagacggcttttacttggaagtcgacttttgcattgtcttcctctgctagatttgttgctgaggctgttgacacgaatggggaaactcttgggcagacgagtttgactgctaccactgccaatatcaagttgctggcgtgatagccaagattgggggacctcagatcttcaactccggtcgcagagctctcttcaactgtgctctccttctaccatttgtcattctgccatattcttctagacttactatatatacacccccaaattactagctacacacccttttgaactactttgggtcaggccttttggctggccatgtaatttaccgagttttatcaagtaatctacacaaccactaaatactagcactcccaactacccattattcgtatttgtaggattattactatcatctgttatgcaaatagctttataaaactagtcggaggcggtatcgtatcatctgaagaatgtgtagctagtaatttgggagttatagaggtccctgggaatagttgacaaactaagctccgatttgaaacaagttatcacttctccgacatgaatacgactatatttcccatcgattttgatcagagcaaggtcccaacctatgacttgatgcagcggaaggagacgatcatatgactttatgcggcggaaggaacacgatcacatgattttatgcagcggaaggacacaattcccatgagttataagtctggactaattaaacatctgcaaagtattttaggcggacctggtccatcgcgagctcttccggcattggctgtaggaatttatcaatctcatggacccaaaaagtgttgtgtggattgacttggtaggcagtagtgtatttccaatatgacggataccaaccagcagtttcccaatcaatgataccaacgagatcatctccacgaacaagaatgttgaggctgctaaggtcgccgtgcgtaaataccaaaggccaagtcttgctgtgctgtttgataagttcctggatgtcagggggaagccttggatcaaattccatgcccatgcgtatatgccgatggaagtcttggatgtttttaaatggaccgaagcgcaaggaagtgcccgcaacacgacagtcaaaaagtgacccgccatcaacattagcaatcatattgccttctgggggttgaagtttccgcatctcgaggattttctcagctaattgcgaaagaagtttcgcctttgaatcctcacttcgataaacccagcgtttgccaattatgtctccctgaatcctttccatcacgatataggtccgcccggatcgagtgaatgcacagaaaacctttggtaccgggatagatgtatgctgcgatatgaaccgcattgttgatgcctcagataaataaacgcgacacccgtgcttaacgcaaattccgcccgtcaacatgagaacattcccttgtcgaggtcgaatacgctcaaggagtttgatcgctataagtgtcgaataccgacgcaaaaaggtgttcttgactggttgggatgcaccaaatgaagcagaggatggcgaggaggaaggtcctttttgactggacgacattatgattgtgcttgaaatgttcaagggaatatctcaggaatatctcgtttctagactgtgaagggaacttagcatggggtcttccataggaagtgatggtcagtgatgcccaggggttatccctgatggtatgatcccaggttcgaaggtgtttagggcccttcacgtgatatcacatgagccgggtctattctcgggccagctgaagttattgtacgaattcttctatcttccacttgactttctattgtctctcccgcctcaatttggttggggtctgctgggtctgcgctgcagtgtattttggggtggaagcgggttcgacgatcgcctagagtgcccacttatatagctggccacttctacaaacatgtaaacatcaaactctcgcttagatagcaagcgaactacgaataaagaaaatttctataaattagataagaacgaccacacttccattctgtccaaataggaaacaaagagtctgtctacattaaggactttacatgcacaaacatccatgcaaacattctgaattcaaagcttggcatcatgtttccagcccggcatatcagcgagatctttcgccggggcactacgtatagatttgagagcatcacccccaggtctccacccccacggatcagctaggtctggcgaaagagacccttctatcagctcaacgacatgtttgccgatgttgggtagaagcttgaagctatgactgtagtatgcgctgttagcaagccgctgatggtataaaagcccgcatttgattatcaactcacccactatctcccgtggccagaatgaagtttttccacttggggtgttcgcagatgagtaaattggcgtcggcagtatctgtgcaccagcacatagagcggttgaaaagctctttatgcttgaattgaggcaagaatctcgcaattgccttgcgaatggtgacctcggaagcttctgggtaagtatctgtaggatgtttggcgtgtgatcttgggacagatatgtttttaggagaggtcgctccgtaaggttgatgctgcttgaagcgagagaatcccgggaactcgtcgcagactttgataacgccgtacctatagggacttagcatgcggttctgctctttccaacattagatcaagagggattgcttactcgttgggctcgaagaagaagccgtattcgccatcgtataccacgggtgtgtttttgtacttggctacttcctcgggtgtgagctgaatatgagcaaagacccacgcctgcaagaatataattagtaactgattcatttgaaccgggatagagagaagaagtatatcgtgaacttactttcgaaacacactggtcctccaaatctaccaatgttggactccaagcaccagcagccaagaccaccttgtcggcgtaatatctagtgccatctactgtctcaacaccattgcatgtgatcccatcggcggtaaacagcggttgcttgaaagttccagatctatgcaatttcgcgtcagtaaaataaatacaagctaaaaaagggtcattacatacttgccaaatccaaagttgacaccttgatcctttagaaaaagtccgattgcattgatagccttggctgcagcaagccaacctccatcgccacaaaacaagcctttccacccctgaatttagactttattagccgctggcccttcaaggttgtgtacgggtgaaatttacctttacctgctctcttgtaaagactggcatcttttcaagtatatcatcttcgctttctaacaaccagttcgttttctctaacccaatgttcgcgtcgagcattgattggtagctttttcgaagatctgcaataccgtctttggatgacgagcagtcaatctgaatgtgttagtatggaatgttgaatctccaatggctatttttctaactcaccctgccgacattgtgaaagaagggcttgaatagtggatcattattccacatgtcaagagcctcgagcgaaagttgcagatctggcccattgcgcaatcggatgcccatgatcttgttaagatcgtatcctgccgattgagccgaaggaatgggatatacatcaagcactgtgatattcgagggagtatacccagagcggatgaggtgcaacgctgttgaggaacccatggtgccgcctcccccaaccaccacgactttcgtggttgtacgcgaatacgccatttttcgggtcatttcggtgcgaaaaccagaatgagggaaaacaggatgtgaatttaagaagttgaatggcaccaattgctaagaaacttgctaaagcgattagataatccccatctatataacatcgcgtggaccttccatcgattaccccgatggccagaatccggccttggcaatgcggggaattaccaaattggcgataacgagatagccttttgcggttatcggccccggctttcgttccgttatcatttgatatcggctcactggaagtccatacaaagattacgccgccatgaatgcgcgtactttcgcgtggaccttcacccggcttgatatgacccgaatggaacttgattgaccccgaagctagaggggaacatccatgtctctgcgggtagaagagataagctcacatataaaaagcaactaggtcctgcaatcaatgtcgggggaataaatcaacacgcatggaaagcgaaattctgttgacatcaaagaccccgaaagccctgtcatggcacaacctatcataatggccgacacaaagactcctgtctcggattcgcacgatgctccttctatcgcagataatgccatcggccatggtgctgtgattgacatgcagcactacaaggacaccgttccgctgtggaagcgagtatggcagcatagtctgacacagatgatgctgttgagcatccaagcattctgtggaccagcaatggctgatgcaattaccggtaagactgattcaccattatacgctaggctacagaatggcctggacctttcgctaatgttttgcaggcctcggtggcggtggtcttgcctctactcgggtgtcaaatatctcgacctcaattggatatgccacgctggcagtcggtatgtttcattacccaacatgagtatttagatactaatttgaatagtctgctgcatcggaggtcctcttgtgaacaaaatcggcatcaagtgggctcttattctcggctcaatgtccttcccaatccaaggctcggcatactactgcaacagcaaatttggaaacgaatgggtgagcgatggcaatgacaatggaaacgacaagaaatgtgactgcatgatctaacaagtccctcctagtacctcatcctgagcggtgctatcagcggtatcgggactgcttgctggtatgtcgctgaagctggagccatcatgacgcttgccccctccggcgcccgtgggaagtatctggctctgtggatcgtttcgcgaaatcttggacaattggtcggcggtgcaatcaagtgagtaatgcctcagtcaaagactcgaatgggaaatttggactaatactttcgctctatgtagcctatctaagaacttcgaaaaaggcgtcagtggcggagtcacttccgatacgtttattgcctttgtgatcattgagtgtcttgcgtgggttcttataagagagaattgcctgcaaccttatgcttatgatgtttaataggctaccattcgcgctattgatcacacccttcgaacgcgttgtccggtctgacggtacaaagattgtcacttcggaaactctttccaccaagatggaattcaagtatattgcaaagaccctgagctcgaaacttattattctttctgcgccctgggcactttggtcatttttctacgggtaagcccgacagtcactgccatcaccatcaaaagcgataatgctaatattcgaaagtggtacttggtctacatatctaggaacttatttcaccgtccgtgctcgcgctctctcgtcgctcatctcgcctttcttttgcatgtaagtcatgcgaaatcatatcatcaacacaaactaaccttggtgcgtatcagcattggctgtttcggcctcggattcattctcgacatgaagggtttcagccagcgccgtcgtgcccagatcggcctctacactgtcatcatcctcaatgtcggcgtctatatctggtccattattatgcaggtcaagttcaaccacaacaagcccggcgccatcgattgggacgatggactgtacgcttcgtcgttcctaccatatttcttcgtgcagacgaccggtccgctgtcccagtcgtatatgtattggcttttgtcttccttcgccaccgactcgcagggtaagtgactccatagactcggacccgagtccatcacggcattggacgctaatggcaatttcagaaaatgtccgcaatggtgccgcattcagatgcattgaagctgttggccaagctattgcctatggcatgaacacccagattaaaactaatcctctgattggattgtaagttcaatcatctgaattcgtcccttttgacaaaaagccaactgacctgattcaagctgcgtgacgttcgccctactcggagcctctgtaatccccatgattctgcttgtcaacacgacaccggaccgtatccctgcagatttagttgccgaggagcagaatgctgctcttgagaagattcgagatgtctaagtctgtttgcatggcggggctgaaagcagcttacgcctttcaattaccaagcttgctagaatgatataaggagtcttatttgcccctacttggattgtctatatttcgtttatttaatctggatctaatggtcaacaattttgcttacttgaaactactcctttccgtactattgtaacgttttgcattcgtttcgtaacgcgcgatcagaccattcaatttgttaagttgagcattaatcaaaaaccccttatcatcaagctgaaaccaaaagaatgttctccgtcaaatcaaactgaaagacaggtgcttctcgtaaacataaaagtcgaaaggacataagaaatgaatagccaaaagaatgagggtaaacaagataaaacacactcgcatccatctcacaacgaaccaatccatagaaatgttcgttcgggcaaagcttcgccaagccctaaattccccagacaaccacgcgcattggcttcaacggtactcaacgcgctcgtagatgtactcaactacttggcgggagtactcgacatcctggtagtagacctcatcaccccggtagaagacctcatcaccctcatagaactcatcatactcctcgtggaagaactcctggtcttcgtagtagtcatcatcctcttcgtaggccactgaacgtatgactcctagcatgcgtcccggtcctagtctatcgagatgtctctcgatgactctgtccctttgaatcactcttctctcgcctctgttgaaccagtaatcgagtagtatgagaagtagcagataccagacttcgtcaactgaaggcttgaagctggagatgggaccgatgaattcagaaccgccgttccaggtcaggtgttctcggaagttgaagttgcgggaccggactggttcgctttcacggcgtctggggaaacgcacgaagtcttcgaagatgaataggatatggcagaggtttgaggcataatagtcgcatatctcgaagtgcgcgtgccagaatgaggtaccacgggggtagacctttttgcagatagtgacaatgcacatgttaatgttgaggattggggctgtagaagttgagcttggaagaaggtaggtttgaatagagtgggaatatcgaagctgggaaagaagggctttagtcttgatagctgcttgagaaatgggaggatttggccggatatttaaagcacttcatcacccccgtataatatcagctttatgcttttctacaatcaggcaacatacatcaagcttagatatgattataagcagtattttccgagacatttatggccaatagatattatgactcgacattttgaggcggccagtagataggcagtgtatacttccttgctctttataacatcaagttatattccatagagggagtccacgtataggttcgcttgattttgggatggcagcctatcaaaatctcatagtatagtatgatacttgctgcattgtggctttggctccatcccaagagcttcaatattcaacctgattatagtaatgtgtattgctattattccctttctctttctactattttcaacgggattgctagggtaagagcctctttgtcgctacctaccatgtttgcatttttgcattctatatgcctcgtttgcatcatttgcatctgtgaagactattcactataaggtattctctgagagggggagaataacgcgggcatcgtcaatcacctatcaagagcacacaatgtttacttacactctcgcatccttgcatccttgcactcttgcactgctggatcaaaaagaaattctttccatctgtttcaaaggtggtactcttgatgttcacagtaccacgtcactctcatcatgataatgagtctacctactagtcaacacgaggctgaccaagccgaggccaggcaaggtgaggcagatcagaaagtgacaacgtggacatgacagctgaccaaccagctctagagcaatccctgatcttatctcaaggacccggtatcaatattagcatccaggcctttgacctgcgccactgctctcttgacgggcccagcgactccccaggaggccaccaatcaccctcggcatctctgggtagaggcaccggccatgccagcgatgacacagattctcactcgtccactgaacagtgcagcgagaacgaatcatctgaaaacgcgttagtctcacctcaaacacctctgagacaaatgatcccaacatggatctcgagcctcatttcagtctcaccccgactaaccattgatggaagttcttctcggcctccaaggtcacccagaatgtccgacccctgggatatctacaagtcagatactgctgtcgccaattaccgcgcgatcggggcccaataccaagcatggatagccgatacagccacaaccccatgcccaatccacctatcaacactcaccatggtagacatagtcgaaaacccgcatgaagagtacaggttcgaggtatgccgcaacgagttcagatccccacccgatgaagtggggaacctcgaatcggtcgggctctcgatggcgaatacttggcgcctccttttcctgaggcgacatggatcctgggatgacgatcgccgagagggttggacggcttaccagcaccgcaccgcacacggcgcgatcttcgctgagaacatcaccagacacttcgggccttactggtcccagatcgctctggcgcagtacgcgtacgaccatcacatcgacaccctccgacatgtttatgtagtcaacattcagaacttgtacacctggccgtacgtggaatcctgtctctacccccgtcatggcttgcaatggcacgaggacgatcgataccagtgctgggaatacggtaccagggagtatcaggagctcctgggtaccaagctgggaaggggggtggcgcgtctggttctgagcgcttggccgagaggcactcaccgtatcgaggcaatcatcacgtggacgtatgttgggaccttgcagatgcggtttgatatcgggcgaatttgattcatggccgagggacacccactgtatcgaggtgacctgcacgtggacgtttgctaggaccttgtagattcgatttgatattgagcgaatttgatttgtgacttcgagcttcgtgaaccaaaagagcgctttgatccaatgtagagcgaatcgtatgaagaggagaagcgctagcctctcttggcggtttcggcagaacttagagtaagaggtcgattggccatggcagggaataggctcatcgtagtcaatcagatgccgggggtgttggaaattttgaaaccctatatagtatgtagtatagtaaggcgtgggagacatcagttgacaatggtgcctaatcaatggacaaggcagaatccgtcgatctcaacactattgtgagagatatatagtgcgtctggattttgatgagccggcatcctatcaaccccaagcactatgctccggtgtcatattcacaccaacacgggcctaatagaagttgatattaatatcggcagcaagcagtttgactgcgccacattttacgtctctcactcagcttcaccatagtgctatattacatgtagatatgaagaattacaatgggtactgcgggtataccaatagtcaaaaggtcaaagacatgattcccaaataggaaagagatttcatccagtcctctgccgacaaaaacatgacgatttaataggcacatccgcccaggctaaatcagctttcagtcgcggcagcatggcacgcgcctcgtttttctgacccatcttgatcaaacactcaaaatacccatgcgaagcccatacattcgctggatgcctcaaagcacggggcagagatctgtcaaccccaaggtccgcagcatatacggctacagcctcctcgacgcgatcctgttcgagcaacaacgctccaagtgcgtgtctagccggctgcatccagccccacggctcgtcatacggcaacgaatcatctctcctcacagcttcccggagatatgaaaaggcagtatcgtattcgccccggcgatatgcaatctcgccatccaacatcgcctcaccgacacggaggatgtcgatgcagcggttattgaagatcgtccgtgaagccgggacaagcttcatcgctcccagaaaccgttctcgctcttcctctgcttccacaacacgactggtcgcagcaaacgcgatcccctttgcatagtgcatcatagcagtggtgacgcagtacaggtctgcgccttccggcagttccgcagcaataatatcctcccagcggccgaagcgcacaaacacatgcatttgcacggagataaagccctccagccagtccgccatcggcggcgactggatgcggaggagaggctcggtgattatccgggcgagctcggccgcagactcgagtgcgaccttcgatcgaccgcccagcatagcagcataaatcctgaaatgataatcatgcgcacggtaaagattataaaaatgtcccaggggctggttggcgaggaacttttcgtctgcgcggattgcagaggtattagccgccactgcgtttttgtaaccgccacacaggacgtcaatatgggacgacatgtgctccagatgaccagcgtctggtacaaggccgcgaagagagttggatttcggcagggcaagttcaggaatgggggacatttccatcaaatggatgtagagatgcaggacgccgggatgatcataggagtcggcttgttcaaagactcgattcagcgccttttccgcttccagtgttttcgcacctggcgccacctcgccggtcttcacgtcccacagaccccatggagtcaggttcatcagcgcatcgcagtacagcgcggtcacgtcgaggtcatccgggtaatcattgtacactgatgtcattgcctcggcataattcttatcccattccgtgcagtcttctatgggctgttcttggggataccggtgctgcagtgcatcgataagagcattctccaacggcgtcgcggtgggagcgtgcttcttggcctctaggatcgcgcgatgggcgcgactcgtggtggcggacagatcttctccgtcgaatagctgccatggcttgttatagttcggacccagggcaaaggcaatgccccagtatcccatgacgcacgtccggtcgaattcgacgaccttttcgaagcatcggatggattctgcgtggttgaaggcgtaggcccagatcaagccccgactaaaccatagttgggcatcttcatttgttgtgctcacattgcgacggtagtcgcctaggttatagtagtcctcggcgggagatggctggtccattttgttgatgtggttgcgtatgttgtggcggaggaggggtatggttgccgaacacggctctctcccagactcatatctaaccactttgaccacatgtgacacggggataagcgccatagcaaatgatgtatatactgggttatttacaaatagtcgcagctgagtaaagtgcctgaggcagtatatcctgaggcaacaaggcagtaaggcatcaatccgccccacatgagcagatttgaggaaatccactttaatgtgctcagtcatgctcgatcactctcaccttccaaggttgagcaccttgggggcctactgggaatcctatttagatagcctcctttcatctctctttgtgtttgttacctgcagtcaatatagtcacatacatatcaatcctcttcgatcccatctcattccatctcatttcaccagcttcacttttatagatcaccatgtgtggagacaccaaccgcccaacattcggaggcaccattgccgtcctattcccccgaggcactcaccagagctcgaacacttcagatagatcattgtcctcgtcaccagaatcagtatcctcatttgcatcatcatcgtcgattgcctcgatgtcatcatactctcttttcttccgcgacacggatgcaacaacgcccaagacaagagcaatcttccggacacaagacgcagagacatatcacgcactcaaagaatgtcgaaatgtcgatatgcgcatcgagtgggttgactctgttccacgagtcattcaagacaaaatgctgacagttcatatcaggaaattcggcgatctctctattacatcacaatccatctctccgctccaccagttccgtttgaatatgggacaggacaagaactgcaacacggcgaatccgatggagatcgagttcgagctgcccgaaaggctggacctgggcgtctcggacaagggtgtcatcggccgacaggtgactgtcagagagcaggggggttcgattttggggatcggagtggtgggatacaactaaagtgactggcttctacatacttcatagacataattggaatcaaactaattgaaactcaaaactctacttcattatagacttcaaagcttcagcaggttctccacaccagcattgtatcgcttctctgcctcagcccagtgaataatcttccaaataccctcaacatagccagccttgttgttcaagtactacaagcaagcagtttagcagacaaatacacacaagacgggtagagcaagagaataaacatacctggagatagtaggcatgctcccacatatcgacaccaaagacaggcacatcaggagcattaataggatcctgatccttagtcgtaacaatctcaagttgacccttggcaccacccttactcacaagccatccccatccactcccctgaagaccgagcagctccgcaccaaaagctttaacaaacgcttcatgcgagccccagcgggaggcgatggcttcgctcagagcaggagcaccaccgaggtcattcccaggagtgccggggggagtcaagttcttccagaacagggagtggttaatgtggccgccgccgttgaagcggagtttctgttgcaatgcgatcagggttgggacatcatctgctgaagctgccgaggcttgagcggagagtgctgcgttcaggttgttgacgtatgcctggtggtgcttctgatggtgcaactccattatctgcttggagatgacgggctccaacgcctgtttattgttagtatggaagagattcgggttcatgatcggatggttcttacatcgtaggcgtaggggagagcaggtagagtgtgagacattgtggaattgtggattatgtgtgtgttgagagttgagaagagtgagaatggagagtagaaatgtaggcgatagataaaccaccaaggtccctggggatgcccctctctagaagtgacgtgatagtaagcatatgtcaagacctcgggaggccaccaaggtggatatccaccggtggatgtggacggcaattgggatgagttggattgagcacatttctcccaaagttgctctaacctgctcagtcggccctcgcagagtattcccggaattacataaagcaggtctaatccaccatctggtatctgtattatctcatacaatggtcttcctcgtttacaaagagagacaggggaactagccggggaaactgggtctctatgctcaaagtgggcttgagcaaagatatcatttacactaaacagaaatagagtcaaggttggacagcacgcattgtagaacagtcaacagtgtatacaaaaaagacaaataagaatgaagcaaaaaaaaaagataggccagcaggatatggaaccagaaggaaccttgaacaaagtgtcctcagaaaaatcttcactgaacaacagagagctatctctgtgataggttctaaaaattgggtcggagatgaaacagagctcctaatgaacaatgcaatgcgggcatcagctggacagtctgtttccacagacgtcagtcagaatacgcgactggtagagcattgttacctcctcagacatgtttcgtgccacaacctaacctgatacccacaagacagagctcgagatggtcgatgcaagcagcagctggacagtccgtatccacagacgtcagtcagaatacgcgactggtagagcattgttacctcctcagatatgtttcgtgccacaacctaaactgatacttgcaaagaccatggtaaaaaaaatcaagagcactccaggaacgaggtgtagtgcggacccagagtggtgtggagaagaaagaaaaaaggaaggaagtgggaggaggcagggaggtatttataccttcccagtggcttaaggcaaacgggtagttaggttgttgacgatttttcccaaaagggaaggcaccgaaccgggaaggttcccagccacccagccacctgcgcaccaggtactattcctatttgggtcactccatggtcatgacacctgagacctgatagaacagtcgctccatacacatattaccttaaatttgagaatcttggccgtttcgcgtgcgtgaaagagtctgtagttgttagatcatgcttctattcaaacgaagactcaaccgactactatcttgatttcaatatttattccagaatcatgttcaatatcatttgcatctagctactcagacagcctccataattgcagctattctgcataatcgtcatgtttaccatccagcgctgttatatctttgtgaaagtggcaaaatccctcgtttcttagagtatggctaatatcacaagaggaactatgaatatattcactttctccccaatctcaaggtggtttgtttacatcaaattctatcgaccaacggatctgcaatcctgtttgttctagaatccactaggtccttctagttcccgataatattggtcctccccttcctgccggctttgggaacagctctgggaagttagcccgccgccagttttccagtctcttgaactgcagctgccgtggcgtttcgcctcgtacattgggctgatccatcataatatcaccccctgcccccagcaagacaacacgcatctcatccagcgcttctctctcatcagcggatgtgggtatcatacatccatgcctgtctagaatatgtcctacgtacagacaatggtgcaaggctgtatttcctctggaatctgtattattgacatccacgcctctgcttatcagaaatttggtcgcctggacttgtcgtagattcctggccataagatgcaatacagtatacccatccttgtcctgttggttgatttcgacaccgtgtgatagaagaatatccatcagatggacgtcaatgggatcgccagctttgcaattggctgcaagcttgtgtagcacagtttggccattgttgtccactacgtctgcttccgctccgttctccagcaggaacttcaccactgtatcaaagtggtcgctcccagagcagcatgcgtgccctcttattgcatggtgcaacgcgttttcgccctgatcgtcccgcgcattgatatcactaccagctaggagtagcttcagggtatcgatgattcgatctttgacatgaacgtcagaaagccagcattcatccgaacctgggcccacggctgcccagtgaagaggcagacgcccattactatcgcgacaggatagggattctgtaatatcacttccccagtggtcaagaagcgttcgaagtgccttcgtattccaatacatgctgctgatatggagtgaagtaacactccatggcattctcatatcatgccaagggtgagatgaatggttctgctggaactgctccttagcgtgtatattgggcccttggtcaatgagtcttttcaccaacgcagagctggctctagaggaggctagaccaagcactgtaccaaatgattgtagtggtttgctttcatcactatcatctttgactgcattaccaccacagagtatcctagacgcccattcaacgtcattggcggggagttcaaccgcttgagcagacgcaccgctatcgaggagcaagcttatcaatttctcgccacgggcaattaaaccggtcctccatcgatcgagatcaatgggcgtctcaggtccgcgaccttccggagacaaatacgtcagagtccttgcagctgccagcagcgctttatcacggtccgattgattgaaatcgacggagtctggcgcaggctgcatatctaggataaactgcgtcgtctgaagatgctgcccgctgcatgctgcgctcagcaatgagtgtttccttcgatggagcggtttcttcattaaactagtcttgtagtagtgatccacgaggacacggagaatatcggtgctccctgcctccgctgcgacgcatagcgggtcgtagcagaaatcatcctcattataaagattcagggatccgtaaacagtgagatattgcttcagcctgggaacgtcattgagacggattatgcggtctagaagaccgcagtcccaggtctcgtagagtcgagtgccatctgtgtcgtgaagggcggtctcttccgattctagaatttcgttcctctggatatggaaagtgcagtatcgcatggtccagagatttttgtgaagtgaggcgagtgtcaaatgaacacaaagggagaaaagaaagactggaacctcttagcttagggaaatgtctccactaacgtagttcccgcccgagtgaaacaccccaaaacactggcttggaaagcgaattcgttcagatataaggcaggcttttcagtcagatggtcgcacaaagcctcgagcgtcaccggagtgatactacgcaactctcggaagaactcctaatatagactagtgtgtcttggcgtaaggggcaggaaagtcaatcgaagagtgtatagattactaatcccccagattccaagctccaagcggggtagggagagtcaacgagcctcggtcaattcggctggtgcaaatacaaatagctaggcccggaagtagcccacttttccctcaactcacttttctacatagttgagttcaaatccatacataatgtccgccgaagaacaagtcaagctctccgacttctccagcatcttctccctcgagggcaaggtcgctgtcgtaacaggcggttcccggggactaggcctacatgcagcctcagggtatgtatctctctagtaccctgccaattattcctgacatatcctaacatatctgaagcctcctccaagccggctgctccaaagtctacatcacttcccgcaagaaggcagcctgcgacgaagcagtcgctgctctcaatgccattcccaacaagcggcctggcgcacaagccatctccgtgccggccgacagcgcagatatgaaagagctagaccgacttgtcgccgaggtaggcaagaccacagaccatgttgacattctcttcgccaatgccggcgcaacatggggcgagaagttcgacactcaccccgagaagatgttctcgaaggttatggatttgaatgttaagagcgtgttctacacgatccaaaagtatgttatttgctagccggaactagggatgagaaggattctaacatcggatcaggttcaccccgctcctcacagcaaaggcaaccgtcgcagatccatcccgtgtcattatcaccgcctctgtggcgggtattggcattggcgcgatcggtgagcacgcaacgccgtcttactctgcttccaaggcggctgctatccatctcgcgaagaatctggctgtcgagcttgggccgcgtcatgtcttgactaatgctattgcaccgggattcttcccctcgaagatggctactgggcttattgaggccaagggtgggataaagcatctggaggagttctcgccgaacggtcgtctcggaaagcccgaggatattgctggtttggtggtcttcctcgggtctagggcttcgagtcatttgaatggagcggtcattgcgacagacggtggagctgtgatcaaggggagactgtaaatgtttgatttgtggctgtaaagacggtatagataggtgcccaggtgttctgctttgattagtaaatatttgatatctcactagccaaaaggaaccgatctgttcatgtagactttcgagacctcgggtactacacctttcgcaatgtctgggccgaggcgggtgttctccacactccccgcattaaaaaacacttccgcgcctcgatgtttctcactacatatccaccatggcctcccaggaaccccgttatgtggcagttgctcagcgcaagcaagcagaccttgctgcagctatccctgcagaatggcgcctgccctcacacctcatccctagtgggatgctctcaatctccgagtcgatcaccgttggcccaaagaattacgagcgagtcggggtgatggatattccacgcacatgtggtatacttacacccaaagagttggaaataacagagaaatacgatgtacggagccttgtggcagaaatgacagaaggccggttgaaggccgaggacgtggtgcgagggttttgcaaggtgcgcccacacgccgattatctccgttcgaggcactaatagatctggataatggcagagagcagccgtcgcccagcaactcactcgctgtctaaccgagccgctcttcgaccgcgccttgcaacgagcccgagagctggatgatcacctccagcgcacgggcaccccgataggccccttacatggtcttccggtgtcggtgaaggacacatttaatataaaaggcgtggactcaagcattggattatccgccctagcattcaagcctgcaaaagcgaatgccccgctagtagatctgctgcagtctttaggtgcggtagtgatcgccaagacaaatgtaccacaaacactcggaacattggatagctgcaaccaccttttcggacgcacgctgaaccctctcaaccgtaaatggacagccggcggcagcaccggcggagagggcgcgttgctcgccatgcgcgggtctatggtcggttttggcacggatattggtggtagcatccgcgtgccagctatgtgccagggtatctacgggttcaagccgagtagcggacgcgtgccatttggaggccagcagagcggtcagattgaaggtaagggccggatagggttgcaagcagtggctggcccgttggctcgctctgttgcggatatcaacgccatcatgacggagatcgtcccacgcgcggagctgttcggcgaagattgcattccggggccatggtcggtaccagccataccgcttgctcccgctcctcggcacagctttactattggtgttctcaagactgatggtctggtcacacctctacccccgatcacgcgaattctgaacgaagtcgccaacagcctccgccgtacccccggcgtcgaggtcgtggagattccgcttccgccggtcctagctaaatgccaagccctagcgggtcggctgatgggcattgacgatgggtcgcatatgctcgacctgattgagagcatggacgaagacctcattccctggctgcaaggtcgaatgaagcgcggtaaggccttgaccgtggttcaactggcgacgctgcaggctcagcgctctgagattgagagggaaatgatgaagatgtggactttgtcgtcacaggcttcgtctgtcgtccgacgcgttgacgccataatttgtcccgtggcgccccacccggtgccggagatggaccgctacaatgccgtgggatacacctcgacctttgtgctgctagactatccggctgcctctgttcctgtccgctcgttcacagacgctgatctggagattgggcgcgaaatggaggcaccggtgttggggagttgggataaggccaatcggcagctgtgtaagttccaatatgatatataggtgatatttcgctaacttgcttcggttacaggggacgagaaaacggttgaccgtcgagtgtacctcgggtcgcctctcagtgtgcaggttgtcactcccaagcagcacgactatcagcttttccaggccatggagattgttgaccgggctgtacagagcgggggttcagccagtgcgaagctgtagccattgcaatgtgtcatagaaacacgacaaacttttgacgtgatcacatgggcccatcctatttacaaaagtcttaagttgtattcgtaggaggcaaatatatgaagaaacgccaagaaacaaaaggattcgtcgggggcgtcggctcaatgttcgcaatgcgcattgacctgattcgttgacttggagaagtcaagcaggtcggccaatagaaatcaattccattgggccagaaccacacaacgggcgataagcaatgcggctaacccctgacaagactaaagccaatctcgcgatgctcttaattatggcgccatcgtcgcccatttaccgtctctggcttggccgtccacgataccatgttaacgctcaggccaaaaaaaaagacgcgaaaaaataaatgaaaaacagggttcgaatccacgtgtaattggtctctcatttgtttataacgtagagccgatctcgtgcctattgtagacttgtcttcttcctatcacctatcacctccatttcacccaacatgtccaaggacgacaggaaggaaccaggctacgacctgggcagcactgagaccaatggagaatatttcgataccatcactgctctggtcgctgcaggtacggcttcaattgtgctgggttgtggttatcggactgagctgaccttatctttcgttcagaccatgagcatgaaatcaagcttcggaccatgacttggcagaagacggcctgcctgcttgccggtgagcaggtttgcttggccattatggcgcagacttggtccctctcgtgagtaaccgctcgaatatctattctcaatgaagctgacggtgttttcagcgtcctcggatgggttcccggtatcattactatggtcctctgcggattcttcttttgggtgacctcgatcacgatgcataaatatatcatgaagcatcctcatattatggatatctgtgagttacagtccgatatccttatacttgcagaaaactaacagcttaattcccaggcgatttcggataccatgtattcggacagagcaaagttgcctacatcttctccgcattcatgatgcttgcgaacaatattctcctcatcggattccacgtcttgaccggcgccaaggtcctgaataccctctcggatcactcattgtgcactgccgtcttctcgataatcgtgactatcatgggaatcgtcatgtccttcccccgaaccttgcaacatgttagcctcatgtcaatgttctcatgtgagtagctgaatcccccagctctcagatgtcccaactaaccatttcagccgcctgcatgggtatcgcagttattctcttcctcgtctacgccggtatcgaaaaagcccctctctacggatacaacggcagctacccgacagacggagccgtgaggacctatgccttccctctaccaggcaccacatgggtcgcctgtatgaacgccgtgatgaacatcacctttatctgggtaccgcaaatcctgttcccaaccttcatctcagagatggaaaggccgcaggatttccccaaagcattggccgttctcggcgtgatctccgcgatcctattcatcgccccttcagccattggattccactacctgggccagtattccaccgctccagccttcggcagtttgggcgtggtgtcatacaagaaatcgtccttcggcttcgtcatcgtccccaccctgatcatcggcgtgatctacgccaatgtgactgcgaaattcctctacacgcgcatcctcggcaagtcccgacactcgcacagccacaccgtgcttggatggactgtgtgggtgttgatcatggtagcgatctgggtgctcgggtttgtctttgcagagatcattcccagcatgggtgatttcctttccctcctgagcgcggcctttgattctttcttcgggttcatttatttcgccgtcgcgtactggcagctcaaccggggatcgctgttcagcggtctcgggaggaccgctaacactctgctcaatcttctcatcttgatgattggtctgttcttgctgggtccggggctgtatgcagccgttgaggccatcatttctgactactcgggttcggtcgagcctgcctttacttgtgccaatatggctatctaaggggaagtcatttaatagctttttatgatcggatgggtcatttgttgcgatttttttatgttttatgatgacttcaaaagaaaagaaatgaactggaatatcaccagccggtgaaaatccaggtttctgtctatcttttatctgtagagtccctgagggcaactacctctcaattccctattccaccctccgcaacccgggataagtataaatactaacaagcctcggccctccagaatgccctctcctcgccgataaaagtactaacaccaccatatctactaccgccgaatacatcgacagcagcactgggacccacaagggaagttccgttaaccgttaacaccaaccaagcaccgatcacacgagccaggatatcaatctcccttaaccctccacatcaagtccttctctctaacaagaagcaccagctatatgctcatacctcactggactaagcccgcattaatcaaaatcggaatcgcccgatcctcaatccactccgtgcatttaatcaacggccgacgcggctccccaggcccataaaacaccaccggatcccaactcttaaccggctccgtcctcatcgtcactgtattaaacgccttctgcttcggcggcgcgggaacagacctgagaatatcgttccagttcttcgggtagttgagagctcgggtatgtccgataagctccttgtagaagaagttctcgtctgtttctgggtcgtcgtagttcacgggctcgtagtgcatgcctgtgactatgtcgcccgtgacgtggtgcttcgtgccgctgcctgggccttgggcgtttgtttgcacgaagaggatggtgtggtagcggggtgagggcatgtctgggtcttgcattgagaggttgagttttactttgtagactgggtagatttgggaggttgacattttggtgggagtttgaggcggatggagattgttcgaggactggcttgtggtttgatgctgagatcgtcctttctttaatgcctttctttctccccgctttttctgctggcaagtttggtatcacgaaatgcagctagccgcccaggcggattggaaatagtaatgtatctctctatttagtatgagcggttaagatcttgtctgacaatcaatgttggtatttccaatatgtccagtctagcggctatccttggtgcattcttacccctcactttcgactacacactcgagaattcccagcaacaagcttatcgccacagttctccgcatatagagaagagttcatttgtcttgctttccttctgatgctgctagatcagaataaaactgttgcggctcggccagggtcgttgaatttgcggctgcctagccatcatcaccttgaggtccttgtccgaggcttttgcagaggtcaatctgctatagagatcaatatcccgtatttgctctggccaggattcatggcagcgacgatgggtggcccatccttcgtagtagccaacgactctgtccatgaagaaatctttggagcaggtctcttgtttgaacgtcaaggttttgttaccgcactaagacatgtcagtcgatacctgaaatatcgagatattggggttgttcaactatagctctaatgcttgggttagtatttgttcacaacaccataggtgctctccgagtaaatgcgctagtagagcgtctttgttacatcgacgttttttcaaatttcacttgtagtagcacaaacttcgaactattcaaactccaaaaaaggggcatcaatggcaacagattaagcgtcgaggctctactggttatagttcagctaggttcgtgtgatggcaagaagagtcagggcattttcaagtctcttttctctaatcgatctagtagacactcgcaaatatagaattgagttctgttaaagcagagggttcgggcctttccggagaagaagggatcaaaactatgaaaatgaagctaagcacttggcgtcggtaaagagggtctcaattttgacatggaatatccgaggcgatgccgccatcaagtactccgtacctcgcctaagattagctcggctctacagaatcttccgactgttgcttcggcttcaattttgaggcgtgatggtaattttcgcgtggcaatcatttcggcatctcagtatcagaaggtctgactcatttctcaatgcatgccgacgttgagtcgtagcttcctacaccccctccaagatgggatcttcaataatagcatttcaatagccttcgcggatcaactcagcacatgtagctacctctcggggccagctgcgctcataaaacgccaggtcagccagacaggcttggtcgaggttttcaatggctctggctcagtcttcatcgtatgtgctgccatatgagctacgatatatggcccatccccacggccaactccaccccaacaagattgaaagtccaagaagcctggatacaaacttccaccctagttttgcgtgttgtcggttgcgtcgctcaataagagtttctttgggtggaaactcaggtgagcgctatggtgtaggccatgacttgtcatgagatgtacgagtggatggggattatagcacatgatttggcgatgttgtgagtaaatgcatgtggttgattggaaactccaggtcttgcatgttctttttatgtctcgcttacctcgcgccggggcgtcgagtccttcaccacatggactgatttatgttcagaaattattgctaagctgttgagtggtcaaaaagagaataagaaactaatcacctattgatttcatctccaaaaataataaaggaaatagggtgttaattgcatacaattggcccggcaacattcttcacctcgaatcatgcgcattcccaacacctcccctcaagtctactataagaatcattatttccttgctcatacgcaaagagatgtaacagatgtcttttaaagaagcctgtgccgtgtccacttttagcccgttgcccggcctccactctagccccttccaaccaatcttgacactatcattgtcgagttgaacaaaccactcaatcgcatcagttttggcacgtaactcaaaatgcggggaatgcgatggcgctcgtgaaacaaatatattatagttgcatccgctataattagtgttcgtgttcctcgtgttgttagtggctgctaggagagtatgaatgcagggtcacgaacttacgagaaaggatcaagcaatatcccagctagtttgtaatagattccttgaaattgttatttttgtaaataattttggagatctcacttgtttggggtctataatgcgaatgccacggcgatcgtgttggatcagagggtgaaatacgagtgaaggctcatttcctcctgcaagggaaatacgaagacagaaatagcatgtagattttctcatagcatagcgtgaatgatttgtctataaagacttcaatgttcatcgccattcggattcctcttctccaactcagcccttctaaaccacagagaacaagaactctctatcacaaacaacaaccaaacaattcatcatgcatttcatctccctcattgccttctccctcacaaccgctataacagcggtcagcgcctaccccatcaccggcgacaccgtcaactgccgctccggccctggaacaagccatacagtcgtcaagacatacaaaaaagcccacgatgtcaaaatcacctgccaaaccaccggagactcaatctccggcaacaacatctgggacaagacctccgacggctgctatgtagctgactactacgtgaaaaccggcagcaacagctacgtaaccgccaaatgcagtagcagtggcagcaccagcagcaccggcaccggaaaagccatcatcgccgcagccgagaaggagaaaggcctcccgtacgtctggggcggcggtggttgcaagggtccctccggcggcggctttgactgctccggtctgacacagtatgctgtctgccaggctttgaagaagacgattccgcgtgtcgcgcaggaccagtataactccagcttgggcaagcggtatcctcgtgcgcaggctaagcctggtgatctcttgttctgggctactggtggtgattgcaagaacaaggttgtgcatgtcggtatctttatcaatgataagacgatgattaatgctgctcacactggtacgccggtgcgtgagcaggctatttggacttcctatggtggagagagtatctgtccttatgttatgaggtatgtatatcattcttgggttttgggttgtcatactaactggtgtatagattcacttgagctttgggtatagctggttggcttgaatttcttttggagattccgattgagagacgattcctgggaaattcagatatttgctggttggatttgtgtgatactctagatagaatgttgaaatggccttctatcttcttcatctattcttggtagccaaatacctaaggtgtgtaagtgtcaattgaaaggaaggaacttatgagagatgatattgggaaaatggacatgtgacatttgcgattcaaggaaggtgcggtggaactatcacaagttaggaaggcaaggtttattggttgtataaaaaggtccctcctccccttcctcttctcttcttcctcaccccatccttctagccaccatttctccgtagcctcatgagacagcgcaggcagagggtctcgtggcacctgctgcctaagctaccacagggactcatgtatttgatatgtaactccacaagtgacggctctaccttgaaaactttttatgttatagaaagtcctccctatgaatgtagcaaggaaatggatattgatatccgcagattcttgagccagttgagaagcccccaaccccaaatataccggagatgaaacgtgacactactgttcataaaatctctctgcgattacctgttgaagaagccaacattttatgtcgatgagcttgctgctttcctctggaatggtgcaaacatagattcagtctcccaattctctttgattgtagcatagtatggtccagccattttcgactcgcaaattgatgatagaaagaaaatcgaaatctcagatagggcgtgttttccgtcaacactgttgaatgtcacgctgtacactcacgtaactcgattgatagaccgaaaaagcagttcactctgtctttaaatagcagacaatcctcacaaattttacggctgggagaggttatcagaatacttgccccacgcaaagtagcttctggctccattgttgaaatgcggttgaggcgtctctgaagtgtttttctatcttcccaaagctgtatctgaccctctcgagcctttaatttccggatttcgggacgagttccaaggagggcaatctcatcatcaacaattgacacttcacgtttcaagcgctggaccagtgcctcgtcatattcgtccccaagcaatcgatcgtctttgtcaaatagcttaaattcaagttgctttctatcatattggagctgatagagtcgggggatgctagggtatatagactccagttccgatattttcaaattttcatctgcgatttctttatcaaaccgggagtcaagcttcttgtcctcttctagaaaaacatgtcggtcgagaaaataagcgatcagttgcttttccgcgtgggacgcaaaaaactgtccctggataccgtggtccttgcgagcatcaacagcgagagtatgaccaacgatggtggctagtttcaggaccctatcagtccaatccttgccgctcacccgtgttgaaggccattgtgagtgtccccagccactcattgccgctatagatgggaaaggaatgcccctttctagcaaagcaattgtcttgtaagatgtagatatgggatactgtcgaattggaccataaagagtgaccgattggccagtagatgaccttctgaaggagtgagaggctgtgtcgggatattgtagtacgagatctgccttggtgtgcaaatctccctcgtcaaggatgcgcgcaatctctcgtcgatcaatatctcggttgacgacatcttccttgtatattggctctttcggatcgccccagaccccacccccaaccgtgtgcctttctttgcggttcttatgagttggtttggtaagattcagggctcgttgatttttgttatcacgcaatgatcgatcggcaccccgagaaagcagtatctttacattctccagcctaccccaaaggcaggcttccataagcgcagtccgcccgttcttgttcgttgcgttgactcgagcgccaaagtcaaggagcaaggagatcatggatgatgttttctctcgagaagccataatgagacatgtatctccgtaataatctcgcccgtgaaggaaaatgggtttgtcgactgattctgtaaggtaatgcctcacttttgatgtttcaccctgggtacagttcgatatagcgaaaagtatgcgacgttcctcgaagggctcttctccttctagtgggatggtgattatctctttggagtcctcgaagctgatctcacgattgttaaacccacttggcatcctcgatagattcatattggacagttgatcagacaaaaatgactcatattcggaactggctaatgcttcaagagcgttgatattgataaaacgtgctctagctttgtcaatctcataggcaacaggaaatctgtaccgatatgaaggtcgaggaaagccacaacgcgatacatgcagggcactttcgtaggatctaaaccgatggtgatggagctcctcgcaataggggcatttgaggtagagataggaatccgtccaccaaataacatcgacgagaggattggcttgagtgagggacatggtcctctgatgaaatggtaatatgggacgctgtggttagatagtcaaagaagagaaattgtgactcagaactctgcggaaggttagttagttatatcattttacaccgcattacgaatgacgaaggaggcggaaaaaaatacgactcgcaatttagagctcttttcaatacggtctgagtcaggttgggcgcgagctgggagaaaactcaagtgccattataagcataactctatgtactaatgtgtagtatcgtacgcagactgtgatgctcagcgaaagtgcgggagtgcaggccggcgcgatcttgctatatcaccagaactaccgatagagtctatgcttccatgagaattacagtacggtgacaatgacggttgtcattttccgatctttataaagcgggggcgggggtgtagatggccgtagccgaagacgcgcaagtacgcgcagcgcgtagtatgaacgcgcaggtagtcatctacacccagtctacgaacaaataagcttgacttggacttaatttcctcaattctatttttatatgtgttctatctagggaatttaaaatacaagttctgtttgaagagcttcaaaatcttgaaacatcccgaccaaagaacttattcactgtccatcggaaagccacacgcaacttgttgcgccagctgatagacatactgatgtatgccatcttccagataagtgatgcagtacgtcccttgataccatctggcaggaatcgcttcggactccggtcagcgttacggggaatctgcatcaacgcgcgttcgtcaccgatgtatgccatggtgccgaggtcgcggaaagagaacggcggggtttgaccgaggtcatttttgttcaaacgctcagcgagccacttcgcttcttggtaggtagcctgtgctgtggcagggggggcaccggtctctggcatggcgttgtcacccaatgcgaacacgtcgtgtagaacggctgtctggcctgtttcgttttgcagctgtacccgcagatgtccgtcgacgagaaggggtccctttcggggggctttcttgaatttccacgctgcgtgttcggcgtccacggctttttctgaggtctcgatgctttggactgagtctgcggggaatgcatcgactgtgtcaagcgattcggtgaccagttttgtcatggcattacccgttgcccaaacacacattccaatgccttgctcgccgtcttcttcggtgtgaagagtcagacagcccttgggatccatggggtggggcccaggtgcgccaggggcaccccagcgcaagcttttaacatgatatgaggtcttgatatcaataccctcgctcttcatggtctccatcgcatagcgggaaagcgactcgtcgaacatcgaaagcaccttgggtgcaacatcgtacaaagtgatcttcggcaattcatgaagactggggtatagcaacatcatatcggagtagatgaaatcgcgcagggatcccgcaagctcgataccggttggaccggctccgacaatggcgaagttcagcagccattttcgcatctcgggggaagtggttgggaggacagccagctcgaaacattctcgcacgcggcgcttgacacgtttggcgtcaccgatatctttgaaaaacatggcattctcccgcacaccgggtgttccaaacgtgcggctgacggcgcctaccgcgatgataagcttatcgtagggtacctcgaacacttctccctgttcccattgaagatgcggctccatggccggcttattcctcgtttccgggccttgctcggttattcggtaatcttgggttgtgcgaggagactcggtgacaccacttttgacgactgttgattcgactaggacggtctttcttttcaaatcgactgaacggacagctccttgaaagaagtcgactttggagcgcggatcacgcacgggctcgacaatgctggagaaatcgagagatccgctggcggtgttggtgaggagaggagtaaagacaaagtatgagcgaggtgaaattatgagaggtgcgtatttctttgaagaaagcttccgcgagacgttgtaaccaccccagccagatccaagaatgacaactcgttccctgccatcagactccttagccaaggcgggcggctcagcatgtgttgcgaggcatctcctgcttggtgtgccaactaccagggcagtgctagaaagggggagcgaactccgtacacgtagagcctcgcggcgaagaggaatcatggtactcaatggccgaatttgcatggtaatgcagaactaacgcagtgtatgtcagtagatcgagggtattatgttcaaaaaacagatctgagctactttgtaactcctgcgatgggattggtgctcgtagttaaggaaggtttcctcttccgctgacacatcgatgacttcaccgtcggcaggaccggagcgggcctggtccactcggtaggatccatattctatcgggtactagtgccgtagaatgcaggtgggaattgaaaggctgctattactgatccatctatcaagttcgtggacacccggaacccttcggagccagcggtgataacgggctgcacgtgccgccggagacgatagggaggtgccagtacatgttgttcattcggcaccgaaaggtttggcggatgtctataagtcgagcaaaagcattccgagggtaacttttgaaaaagaggagaataccgccgctatatgagttcgcggtgagtgtcatatgattctatcatatgatgggggttgacctcgggagctagggcttggcggaatcacatgaatttgatacaaatgtagtcccgagttatttaaggatcaccgagattccaccggcatggagcttggacgctcccgagattccaccgcgtcgaaacttccgtgtctccgagcttctaccgggttactccttagagcttggatgcagatttggttttctaggttccgggttgttttctcgcgttgtctcccccttttgttcgaggactcccaaggttgacagctgcccaactcatcagcactgcggagagggccagcactgcggaaggagggtctagttcaaggcttgtcccggtcataacacgtctagaaagcatccgggccactgtcacgacattgaagcggatcggtcggtccgttcgcatcaacggggattccaaggttatcatgcctccctttggcttcacttcataggcggtgagaaacgcgatgacaatagctgacacatcgtgcgtggcgtcgtgtggcgcagacgtgtatctggagtggcgcggccctttctgtgtcagaatctcggatttagggggagactacctaatcgggatgttctttttctccgctgttctaccccatgtatctttattcgcccctccgagctttaagttcctcgaaggtacggagatcatcgtttaattcatcgttatcaccgatatattgctccattgggatgaattctcggccccgagctctgctggcgtccagcaggttaggcagcgttgtacgtatacttccagggtggcggtttacatggctgcctgagtgtacaaccagttgtatataaagatcatgttgcttccgtgcatacctaatatcagatcaagtgtcttcactgttcttcgctttactttctcgccttttgatatcttccaacgtatcattttctcgcgcaagtcacatatcttacatcaaacaactacttcaagatggcttccatctaccaactcaaccaacctaccagtcagttttgggactttgtcaacggcaatctagaggaccatcctttctttgctcctcgcggccaccgcggacaccacggacgtcgtggacctcgtggatgggataccccccagcagagcgacaataccaaccgagacgctcaagcaggtgaaaccactgagcccaacgccgacatggagaaggacgaaacgtcagcatcggactctgactccccagacaacaaccatcgctgcgaccactgcggaaatggtaagggcaagtacggtagccgtggaggtcccgaccaccacggtccaggcccattccgtggcagaggaggcaagggcagacatggacatggccctcacgctggcccctacggccaccacggccctcacagcaccaaggaattctcacaggactctgaaacaccccaagcagtcggtgagctggccgacgcctctaaagagaacatcgaaacctcggcatcggactctgactctcctgacaaccaccgccaccaccgcccccgccccgggggnnnnnnnnnnnnnnnnnnnnnnnnnnnnnnnnnnnnnnnnnnnnnnnnnnnnnnnnnnnnnnnnnnnnnnnnnnnnnnnnnnnnnnnnnnnnnnnnnnnnnnnnnnnnnnnnnnnnnnnnnnnnnnnnnnnnnnnnnnnnnnnnnnnnnnnnnnnnnnnnnnnnnnnnnnnnnnnnnnnnnnnnnnnnnnnnnnnnnnnnnnnnnnnnnnnnnnnnnnnnnnnnnnnnnnnnnnnnnnnnnnnnnnnnnnnnnnnnnnnnnnnnnnnnnnnnnnnnnnnnnnnnnnnnnnnnnnnnnnnnnnnnnnnnnnnnnnnnnnnnnnnnnnnnnnncgggcctctgccccccctgacacccccccccccccccgccacggccgcggcggaaaattcaagaacaagggccatggaggtcccggtcaccatggaccaggtcccttccgcggcatgggtggtaagggaagacacggccacggccctcacgccgggccttatgacttccacggctacggtcatcgccctcacgccggaccttacgacttccacggttacggccacggccctcacgccgggccttatgaattccacggttacggccatggccaccaccacggtgccggtgccttcggaggtcctggacgcggtggaaagggctggcatggacatggatacggacacggtccccacgctggaccatacgatttccccggcccccaccacaacggtggacccttcggtttcgggccccgtggacagggtcacccccacaaaggaggccgcggcagacacagcggacctccacctcctttcggcggtccattcgacttcctgcgccagcttggtgcaggacttggcttccctatgaatgcgcctaccgcagagggtgttgacttcacgccctccgttgacgtcttcgatacccccgccaaatacattgtccatgtctcacttcccggagctaagaagagcgatctcagcattgactacgacgctgatgagtctgttctgcatctgtcgggtgttgtctatcgccccggtgtcaatgaggatttgcaccaggctcttgtaatggaagagcggggtcagcacgttggtgtctttgagcgcgagatccgccttgggactcgtgttgtcccggctttgattattgttgatggcatctcggccaagttggaggatggtgttttgaatgttactttgccgaaaattgtccaggaacctgaggttgggaagaagaaggtttttgtggaggatggtgccttggagaatgagaaggacgccatggtcgtcgatgagaggactctcactccggtggagtctgaaggaagcgaagttgacgatggtgagaccagagagtatgtcaaggttcctgtgcagtgagcacaggtcgagtttctgggtttctgagtttgagtttctgtgattttgggtcaattggagttggagttatgaatttttgatttcccttgtttaatatttgaaattgttcactagttatgggataataaatcgctgctcaaggtcgagtggcagaaacaccaattttgctcgtgctgtaggctcctgtagaccagagtaaatatttatcagtatgtctcatttagaatgaataaacagtctagatctagaggaatctagttcaggttcaaggctatgggctatggttcgatggttattgtcacgccgagtgctgtttcctaatataaagtccaaccgtgttccccaattagcatcaattaactaaatttctctcaatattcaactcgtcttattccaagtgatgcatttgggcgcgttcattgttaacccatgcacttcgtaaacctctctgtggcattccttctatttcctttatctctcgcagacagcttgccgttcagattttcctttgttggcctgcagggatgcttcttctactttttggtggatgagatctgatggagctatatagagagcttcatggcagtagctcgatcctcatcatccatccacttcaatctccagatttctggttgatcatcctttttcctagtctgaaaactatatcaccacgatgtctatatatatatatctgaggatacaatatttccctttcagccgctgtcatcctcaccatcttctccagcgctgcgactgctcactacaattatcagctcatcaagccaccatgctgccagcatcgtgacaaccaaaaacccaacccggactaggttgggcccggagtgaagtaccagcatggtgctagattccgcacccaacgcattgggatcggcagaataggtatgtcacggttcttgttttactctgtaaaaacaccactaactctcaactcacacaatctagagctagccttaaagattccctagcacagttgactctccgcgcatttgattcggcgatatacctaaatcctaaggacacagacggcccagtcgaccttattcacatcgctactattagccgcggctagaataagaccccctatcgcttccttataaatgaaaaccccacacatgcggagcacctgagcttgatgtcaattaagaggataactacgcccctagtgagaggagatatggtctcttttctcttacattgcgatggtaagtgaagcccctgtcaccaaaaccggaccgtaggcgtttgctaaccacatctcatcttagatgagcttcatgtatacaagaggcgggcagaaaacagcccaaaccagataaggggcaaaataagtacaatgccgaagatgagcctcgccttctgggaagcgtccaaaggatcattgctcgagtccatctggtgagcaaccgacagattcttcctcgtcggaagaagctgcacccagagtttcggcacgtagtaaagcagtcagggatgcggtatgttgatcgagatgatctgtgatatataatgctaactttacatatttaggtcttggctcgagatgggaatagatgtgttctctcgaggttcggtgtacatgggttacatgtatctcacattcttcctttcgagttgaacaatggctctatgcgtgaaacagactcgaacataatcttcatcgtccagttcatcttcttcggcttcttcgtgatggttgcaaagagcttgcacttccgcatctcgcgtcagtcaatctccagatcgcagtcagatcgtggttgccgaagtgatccccgcattgatggttgggaacttaaagagcgacttatatgatccaaacaaagcctagtccggagagatctggatgaatacccgcgtacgagcaccaatcgattaggataggacatagcagcagtcgaaatcgacaaagatagagtacggcccgtgagctcttcatgtacatctttgatggattgtcggtgatctctgatacctttgacgagcatatcgaacatttaacccttgttctaggtgtgcttgggaagcacggagtctccttggaacccaagaaagcctaggtcgccttccccgaggtctcacgtttgggccagcgggtagacgcgttaggtatgtacgccggaagacaagatcaaagccattgccggtctggaatttccccagacgttacgtcagctggagacatacctcggtatgaccggcgctttgcctcaatacgtgcctcactatgcgaagaagtcagaaccgctccaggtcatcgacattttgtgtcacccgaggtgatgcatacttaaatgaacttctcaattctcatctgaaacttaatcacttttaacgctatgtagaaaacgggtatatgcaacttttgcctactcgaaacagcaaataatcacaatatccaatcattagatgccataaatcatatcatcgtaatctggagtccatactaggccgcaggtcgtaacttttccgcatagtgccattgctcaatccaccatatagatcaggccgcctcgaggcccccgtgccgcgtgtagaaacaggtagcagaccaccaccatattccacatcgacactcctcctcatgcgcggtaaactcataattttctccatctccaaagcctggagcgtttcctcgcttcgttcactcttcgcagacaccttcgcccggttagacaaccagcgtcgactgcccacgcggaagaaacccccgatatcatcaacggtgagagcgacccagacaagcgggatggagattgcaaagccaataccaaaggtatactttgccacatagccgagattcaagctctcgaattctttcaggttgatcgtgaagatggaggcgataaacgacaacggcaggaagacaatagtgacaatagtgaagaccataattgtcttactctggcgggttgtaccggcagcctggtcacgggcgaagcgggcctcgaacgcgttcgcgtgtttctgtttcagatcgagcaggtccgtgatggagtggtagatgcgctcggcttgtttatccatgcggtcaatatcctttaggtgcatgtcgatcatgcgctgctggtctttgaaccgtttcttgacttcgaattgggaccggtgctggccttgataggtctcgcagacgacttcttggaagtcgagcaggacgttgttctggtgctccagcaccgtccggatcatgttcagctcgtctctgatgtcctttgtctccgctaggagattggtttcctgtccgatgtctaggagtcggtcgacgaatagtggctggccgtcctcgtcgcagtagttgctgctttgatcttgctcgtcggtcccattgtaggactttggcggagagctgaaggagccgttcagcttgcggtgacttttcagccactctgatgcctgcccggaggcgtggttgaattggttaaaaagcacggtctctttgtccgtggctatacctatagatgactcgaacatatctaggaactggtactcctcgtcgcctaggcggtgtcgatcgaagacacccgagcatcgattggtgattatcatggctagatcatagacggatttgacagggtcgcgggttttggaattgatatcctcgataatcccatccagcacattaagcgggtcattcttgggctggtcccatctctgcgggaaggccgttacaatcagattcgtgcctagaacccacatccagagttgatccaccatgaatatcttggggtctgcccccattccggggctttttgtttggtaccggtacacaacttggtcctgatcacgactcttggtatcgatattcgggtagaaaaactggtccagtgttcggcggacatggagggaggtcgttgaggacgatagatgcgcatatatgagtatttcgtctcttgtgcgcgttctctttatccccctgggtataaaatcaagcgtttccgctcgggagattgcatcctgcatctgttgtctgcgctctgtggtctcgaaatgtagatacggcatgaacacgcagacattacatgcagaaaccagagggtgagggtctttgcaaaaggttgatgaagacagtgatgacctctgtttctcgccctggcccgacttccccttcgtctcctgcttgggagtccctggtacgctacccgacttgccgcgcttcggattgttcttgttcttttttccatgcccttcgtcgtgaaaataagaatccgccttttcaggcttgctgcctgtgcctttttgcttgcgggcagggctatccatggcccttacctgcccattctcagacgcaggctcctccggagtctcctcttcatgtcgacgcagcatcgtccgcggcgtattctgacacaacggtcgcataaagtgcgaatgagtcctttgaccccgatgctgatagttgaaagacttctccagccccttgaacccatcaacatcatgtgcgccctcctcaataaaggacttggtaagcagagcttccacccacgccatattgttcgccggtaagtgaatccaccggaaatcagtcccacgactatcaaccggcacagtggtaacagcctgtttcctaggattctccggatccctcccataaagcagattaaataccgacatgcgcttaacccgattctcattatggaagtttccaaagtcaacaacagtagcatcgaacgccgcacaagcctccttgacaccatcagatagactgtcgacattgttaaacggcgccagcaacagcacaatatccttccgcttgaactgcgccgcacgcagaaacggcgtactgccaaaattatccctaacccgacgtttcagatcaggcttctcaagaagacactgcacgacctcgcgatggccgccctgcgcagcaagatgcagcggcgtaatgccattcaaaagctgtgcgttgatatgcgcgccttcgctcagcagaatccgcacaatcgcctcacaccccttatcacaggcattatgaagcggcgtccagccaccatcactagcagcattaaccgccgccttgtgcgcaatcagcagctgcacgatatccgcacggtcatgagccgtagcaacatgcaacgccgtcttaccacgcagctcaacggcatcgatctgcgcccccagcccggacccccgcacctccccctctttctccccctcgccagcattcctcgtcaacaacatctccgccatcctccaattccccgtcgcacaagcccaatgcaacggcgtccgccccagctcatcctgccccgcaaccccatcaatagcacactccgtccgcaacaacaaccccacaacctcctccccccacccccaccgacaagccctatcagcggcgaggttatgcaacgcgttccggcggcgcagatcgcgctggttcacgtccgcgccccgcatgataagcaggtgcaggatatcggcgtggttcttccacgccgcggtcatgagcgccgtgnnnnnnnnnnnnnnnnnnnnnnnnnnnnnnnnnnnnnnnnnnnnnnnnnnnnnnnnnnnnnnnnnnnnnnnnnnnnnnnnnnnnnnnnnnnnnnnnnnnnnnnnnnnnnnnnnnnnnnnnnnnnnnnnnnnnnnnnnnnnnnnnnnnnnnnnnnnnnnnnnnnnnnnnnnnnnnnnnnnnnnnnnnnnnnnnnnnnnnnnnnnnnnnnnnnnnnnnnnnnnnnnnnnnnnnnnnnnnnnnnnnnnnnnnnnnnnnnnnnnnnnnnnnnnnnnnnnnnnnnnnnnnnnnnnnnnnnnnnnnnnnnnnnnnnnnnnnnnnnnnnnnnnnnnnnnnnnnnnnnnnnnnnnnnnnnnnnnnnnnnnnnnnnnnnnnnnnnnnnnnnnnnnnnnnnnnggggcaggatggcggggtgtttctcccccgcggcggtcatgagcgccgtgcggccttctttgtcggcggagttgggacaggcgccgtggtcgagcagcagacggacgatttcgtagtggtcgcgctcgacggcgcggaggaggggtgaggcgcggttggaggggacgtcggttttggcgccgtgcgtgaggaggtattctgttgcggcgatgcaggctcgttcggcgctgcgcattaggccgatgcggaggaagttgtcgtttagttggttgtactcgtgggcgagggctattgtcttttttagggagtcgatgtcgttggattcggcggcgcggaggagccgtggctccaggcgctcgtggctgtcgcttgttatgcttgaggctggcattgtggttgaggtgtgtagtggtgagggaattgcggtattagattatatatatggctgtgtatagatgtatagcgtgtcgttaatccattgctgtcgtttcttggtgagttattgagactcttctagttttccctccccggtaggataagcgtttggagatggatggggaggagaacttgggacaaagctagacttgaatgaatcaagctcaagcgccagcagatggcccttttcccggtctggaaaggatctgcggacctgaaagtacttcgtttcctcagccccaatcctatgggggattttgtaaccgacggcgaaaatgaggctgtgtggctgatccgctcgtatcgcttgttttagtaggtttggccccagcatatgcatgtttcaagatttgactagttggatcctttgggaaagacgacagaaatttctgtaagagcaggtaaatccagggtatggcagccttggaaggtccaatagaatgtatgttgtaggtacggagtagagcctggttaacatagaattaagaatctggtaactcaagccgtaaccatggatccgggacaactcaatggccacagaactacaaatccaaactatatacagccagtaaacctcatacgaattgtacagacgttagaatctatatttctatcgggcactttctagtcacaaactacgggggatgtggcggggaatccaaggcgaaaagaaaagggaaaaattaaaatgacaaggtgaaaagaaaaagaaaagccccctccttcggagatgctgatgccgatatgctgataattatgatgtgcttctcccatgcatgccgcccccgatgaattaaaaagttcttgctttttgttttcgcttccctgtgcatcgcgccgatcccgcccagtagtttatgtcacaaatgcgcctatcaacagaaaaattaaacggtcaagagtgtggaaatcagaggcacaaacgagtttgtattctgaataagcagaccgcatcatagtgccatgcaatctaaccatagagagaagacgcaagacaaatggtatctagtgcttcttcttgtccttctccttcttcgggacttccttgagaatatcgtcgaaactcatgttcgggttgaagcgactattcggacgtgtaggaggctcgataggggcaattcctgccgggaggggcaaggcttccaacccagggtagaatgagtggcgatgctgctcggcccgttgggcagcggcaggcgagcgcgttcgtggaatggctggaggcgggggcgtgagcccaccagggaccatagggtagggatccgaagaagagccagccgatgattgatggcccgggtaaggtgatgatatagaggactcctcatcatcgtaggtggcatcttccaccataggtggatcgaaaagagcgcccgcctcggcccactgctcggcgacttgccagcaatgactgcggcggtatacaccttccactccgttgatgactacgtccgatggcatgctaacaacgccagcaccaccggcaactccgaaccagctgcgagcagtcttggtgtcattatgaatccagggagcaccgccacgtggagcaatgcagaggaaatactccacgccctcgttgaagtggacttcagggacatccaccaccagcatgggcagggcttgaatgacggcgtagaggaagatccactggccacatcggaggtcggtaatgtcattagcattcttgccgtgcgcggaacgacgctcgaactgcatgaagctctcgatgaaaggagtgggtcgcatggcctcccgggtataagatcccattaggacagcattgatgtcggagtccttgagctttttgacgctctgcttagcctccttcttggcatccatcggtttccgatgtaagggctgcagtgaaggtatctgtggaatgtcgaatggaatgggaggaagtactggtggtgtgctgcggtcatattcggagaggacctgccgcaaggcacgaatggtcatttgcttgtaatcagatgattctgtcgtgtcattgcccgcacccgaaacatcaattgtacgcgtcgtcagagacgtgcggtcaaccattaaatcgtagagatcggtgaagtcgtggtacaaatccagaaggagaagacggttgagtccgttctcctcaaactcgttcttcttcgaccgagccttgggcggccacgagccgtatttctctcggtagtagtggattgtaaagcggcggaattcatggaatcccgtcctccagttcttaaaacgcacaaccttactttccggggaagtagtcgagttggcaacacccgagaaaacggaggggaaatcgaaatcttccagtttgccgtagagaccgcgcagacgggtgtccaaatcaatgaacgcgcgctccatgcgtttctgcgtgatagggtggatgaaggtatatttagggctccgcagttgcttgagctcatccagctttcccacaccgtggacaaagccctcgacgtacagcggatagtagcgcagacgctcacccaaaacgatggcctcgatcgtcttctccctgcttcgacggacatctgcgaggcgcaattcttcgcagtagttgctgaaactcgaggtggcagtctcaccaaaattggacgcatccaagttggagaactcaaaccgggccaaaaggacggccacgtccatgaaaatagagaaaagagtggatgacttgggtgaggcgattaaagactggccgagcaggaacgcgaaaaggttgcggaacaaaagaagagtctctgtgtcctctggaccgagccttgtttgtgggttggacaaatcgcagttcagcggaatggggaggtaaagatggagttcctgcacttcctccggggtatcttcgaatgccatcctttggcttcccgcactgtcattatcgttgtcattttcgggctgacggtccaccggtgacatagggggggacatgggagacccgggattgagtgacatcgttctagttggctgctcaaggccgctcttgccatcatttccgcgggctagaaaagtgagggagggtgattcggcaaatatggtggaatcgaccttgaaagacggagggtggccggtagtctgggggaacatgtacacataagtgtcaccttgctcgttccacagttcctggatctggaaagtgataagaaatgattaacgtttgcacctcaaaacaagtgatttcgcgtctgcatacctgttctcctctagacaatggacctaaatcataaacaaccttctggtccagtcctgcgatccaagcagccggaagcattgcagcaggccgcttatcggttgagctggcgcgcgaacgaccgggcatccagcttctgcgctttgacggtgtgctagggcgggaatctgggttggatccagggatggtcaaccctgccgagctggagggcctgctcatatcacggcctctgctctgcggacggccaatgggcgaactcggcacgctgttggccagatcctggttcacctccagcagtgacggtggtgggggtaggctctccatatcgaggctatcgggcatggtccttggctccgaggcatagacggcattgggggttgagacatggcgagtgggttttgagctgctccggcttcgtttgtcgctaacgttttctgacgaattcaacactggcgaagacgcaaccgaggattgggattcccgatcttttgatcccagcgagaacagagacgaaatccgcttcgccgacttaacgggagccgacaacatcttgggtgatagagatgttgggagaggatgagtgttttttttttcggggatgagagcgacccggaggtagagaaggttaagcccgcatgtgagccctgggggaatgaagtgtgcttggcaggtgatggggggaggcggaggtttagggggttgtggaatggatcggcaggagggattggaagaatgataggaaacctgacaccgttcactgacgagaggcgaaaaattagaaaggaagagaatgacaaaagggagagaagctcaggagaagatgagaataaaaggcacaaaagctaatatcggagccttaatttttagatttcactattatttcacggttttaataataatttacgaatacatgccagatgcataatacggcctattgccaataatagaacgagcacgatgagacgagtggttccccggctgtgcatgtcttggatgtggagacaataaaatacgcgatttatagaagagaggtaggtaaccatattcaattgcgttatagggagtgtaggagaaatggaaacgatatccacgtctatcgattgtgtatacatgggttggagtaaacaaataactgtacaaagtgcttagggagcataacccaccttgcaaggacccaataaaagcctttatataaaacacgatcatgccgctgtgatccgacataactggggataccagggtatgcaccgtatttaagaaaaccagtagaaagtagtagggagtatgacgagacgtacagagttccatccgacaatatcatagttgccctcccccgtgtaaaatttgatggcaaggtcgggaaactcgcgaccgagggtgacagtcgagggaacaccggggttttgaggccgacgcttctcaagaagtcggacttggggtatggggttttggatctttgtgcacaatttggcagtcgtatccatcaattatggcggtttggccgagtggtctaaggcgattgactagaaatcaattctcttcggaggcgcatgttcgaatcatgcagccgtcgtgctgtatccttttttttggacaatttctgacaatcttttttatggttttgctgctgcggagtacatggacgtaattaacagaatttccttaatcctagatttactatagccctcgagctatctaggaagaaaccaactccgttgagccgaatagtctactaagatttcatttcttatggagatatgtttcacgagagttcctagtatttatttttagcgagaactattcaggctagccagcgtagcatacacaattcctatcagctctatgatacacatttggagcgggctaccacacatttggagcgggctacctatctaatatggcggtttggccgagtggtctaaggcgattgactagaaatcaattccgttcgcgggcgcatgttcgaatcatgcagccgtcgtgctatttcgttttttaatattttattgacaatacatcatggaggacaccgctattccagtaccgccttcctaatcgggttctactcaggcgctaagcgatattcaaaatattcaagccgtggaagttcctggccaactaaatgcacccacttacaacaccattgcaagaaccattgccggaaccatgccctggaatccacgtcaacccagtatctttcacgatgagtcatggcctacaccatggcgttcatctgaattcccacccgaagaaacttttgtcgaacgaatcaatcgacagcatgcaaatcccgagtgggagtctgtaccgcacttcttatactacgagtctggtaggagtgggggttggccatggggatgggccatctatcgtacctcctatctcaacacttccgatcaagactggactagagctattgaaaagctcgacgaggcctgtatggctgacctggagttttacgagcgcagctggcaccgattcgacctcaaatgcgttgaaatggtccgcgagggttatcggaatgttatctttgaagaccccgcgttagagggcgcgtcggaagcggttatccaacgtcgacataaagaatgggtcgaaagccatggcctccgcatatctagtggcattcctcgccttggttacgcacttttgttagatgatcgctgtatacgatcaatcttggccagtgcggcgcctagaaagccatctgttatcgaacaggggctaccatggccaaagattaacgataaaccgggggggatggtcggttatgttaactttatcgactctttcttccgccccgaagacccggaaaatgactatggagagtactaccgtggattggtccgtgttcatttggactgtttagcccattttgctatctattgcgaggatcttgagactggagagcaggaatggggtgaatatgggatggacatacctgacaatgtattttatacagatggccattgctcaaagactgagttgaaagaaatgtttctttcttccccagatagaaacgttgacagaactgcgagtgtgactgagctcgagtatatcgagcgccaggatatggagaacttagcattgagtaatgtgccgggttctacctaacactggaatgacaccaataccaacggcttttttaatccctagataatccaacagttatcctctttcaaaaggtctttttggtcttttctaggatatgttagaacatgaccactaactacctccgaatattattagtagggaacctttgatacaagctatttctagacctttaagagactgcatacatatttgtataaatattgattcatggcagctgattaacctcccggcgaaaaacccggtgggcgcgatggacccaaaaacctccgtaaagagcaaactatgacaaatcagaataacatcctagtgatttcaagagaatcattggcgttgagaacgatatcgtgttcccctggtcctgggggtcgatcgtaaatagcaacgaatggaagacttgacggggccccgacaacgttgttggactgaacgtagacctcctgcaccgagtatggctgctgggtgggaatcgcccggatagcaagtgtaaggggggctagttgacatttttcaaaggtgacttcagtcaaccccatcgagataataataacaatgcgcactagaccccggggaatgataagccatctcttagcgtcttcgcgaagccgagggagggatttagaaacgcccattggggcagcgatctggtggtaagaacgcatggcctccctgtttacctataccggcggcnnnnnnnnnnnnnnnnnnnnnnnnnnnnnnnnnnnnnnnnnnnnnnnnnnnnnnnnnnnnnnnnnnnnnnnnnnnnnnnnnnnnnnnnnnnnnnnnnnnnnnnnnnnnnnnnnnnnnnnnnnnnnnnnnnnnnnnnnnnnnnnnnnnnnnnnnnnnnnnnnnnnnnnnnnnnnnnnnnnnnnnnnnnnnnnnnnnnnnnnnnnnnnnnnnnnnnnnnnnnnnnnnnnnnnnnnnnnnnnnnnnnnnnnnnnnnnnnnnnnnnnnnnnnnnnnnnnnnnnnnnnnnnnnnnnnnnnnnnnnnnnnnnnnnnnnnnnnnnnnnnnnnnnnnnnnnnnnnnnnnnnnnnnnnnnnnnnnnnnnnnnnnnnnnnnnnnnnnnnnnnnnnnnnnnnnnnnnnnnnnnnnnnnnnnnnnnnnnnnnnnnnnnnnnnnnnnnnnnnnnnnnnnnnnnnnnnnnnnnnnnnnnnnnnnnnnnnnnnnnnnnnnnnnnnnnnnnnnnnnnnnnnnnnnnnnnnnnnnnnnnnnnnnnnnnnnnnnnnnnnnnnnnnnnnnnnnnnnnnnnnnnnnnnnnnnnnnnnnnnnnnnnnnnnnnnnnnnnnnnnnnnnnnnnnnnnnnnnnnnnnnnnnnnnnnnnnnnnnnnnnnnnnnnnnnnnnnnnnnnnnnnnnnnnnnnnnnnnnnnnnnnnnnnnnnnnnnnnnnnnnnnnnnnnnnnnnnnnnnnnnnnnnnnnnnnnnnnnnnnnnnnnnnnnnnnnnnnnnnnnnnnnnnnnnnnnnnnnnnnnnnnnnnnnnnnnnnnnnnnnnnnnnnnnnnnnnnnnnnnnnnnnnnnnnnnnnnnnnnnnnnnnnnnnnnnnnnnnnnnnnnnnnnnnnnnnnnnnnnnnnnnnnnnnnnnnnnnnnnnnnnnnnnnnnnnnnnnnnnnnnnnnnnnnnnnnnnnnnnnnnnnnnnnnnnnnnnnnnnnnnnnnnnnnnnnnnnnnnnnnnnnnnnnnnnnnnnnnnnnnnnnnnnnnnnnnnnnnnnnnnnnnnnnnnnnnnnnnnnnnnnnnnnnnnnnnnnnnnnnnnnnnnnnnnnnnnnnnnnnnnnnnnnnnnnnnnnnnnnnnnnnnnnnnnnnnnnnnnnnnnnnnnnnnnnnnnnnnnnnnnnnnnnnnnnnnnnnnnnnnnnnnnnnnnnnnnnnnnnnnnnnnnnnnnnnnnnnnnnnnnnnnnnnnnnnnnnnnnnnnnnnnnnnnnnnnnnnnnnnnnnnnnnnnnnnnnnnnnnnnnnnnnnnnnnnnnnnnnnnnnnnnnnnnnnnnnnnnnnnnnnnnnnnnnnnnnnnnnnnnnnnnnnnnnnnnnnnnnnnnnnnnnnnnnnnnnnnnnnnnnnnnnnnnnnnnnnnnnnnnnnnnnnnnnnnnnnnnnnnnnnnnnnnnnnnnnnnnnnnnnnnnnnnnnnnnnnnnnnnnnnnnnnnnnnnnnnnnnnnnnnnnnnnnnnnnnnnnnnnnnnnnnnnnnnnnnnnnnnnnnnnnnnnnnnnnnnnnnnnnnnnnnnnnnnnnnnnnnnnnnnnnnnnnnnnnnnnnnnnnnnnnnnnnnnnnnnnnnnnnnnnnnnnnnnnnnnnnnnnnnnnnnnnnnnnnnnnnnnnnnnnnnnnnnnnnnnnnnnnnnnnnnnnnnnnnnnnnnnnnnnnnnnnnnnnnnnnnnnnnnnnnnnnnnnnnnnnnnnnnnnnnnnnnnnnnnnnnnnnnnnnnnnnnnnnnnnnnnnnnnnnnnnnnnnnnnnnnnnnnnnnnnnnnnnnnnnnnnnnnnnnnnnnnnnnnnnnnnnnnnnnnnnnnnnnnnnnnnnnnnnnnnnnnnnnnnnnnnnnnnnnnnnnnnnnnnnnnnnnnnnnnnnnnnnnnnnnnnnnnnnnnnnnnnnnnnnnnnnnnnnnnnnnnnnnnnnnnnnnnnnnnnnnnnnnnnnnnnnnnnnnnnnnnnnnnnnnnnnnnnnnnnnnnnnnnnnnnnnnnnnnnnnnnnnnnnnnnnnnnnnnnnnnnnnnnnnnnnnnnnnnnnnnnnnnnnnnnnnnnnnnnnnnnnnnnnnnnnnnnnnnnnnnnnnnnnnnnnnnnnnnnnnnnnnnnnnnnnnnnnnnnnnnnnnnnnnnnnnnnnnnnnnnnnnnnnnnnnnnnnnnnnnnnnnnnnnnnnnnnnnnnnnnnnnnnnnnnnnnnnnnnnnnnnnnnnnnnnnnnnnnnnnnnnnnnnnnnnnnnnnnnnnnnnnnnnnnnnnnnnnnnnnnnnnnnnnnnnnnnnnnnnnnnnnnnnnnnnnnnnnnnnnnnnnnnnnnnnnnnnnnnnnnnnnnnnnnnnnnnnnnnnnnnnnnnnnnnnnnnnnnnnnnnnnnnnnnnnnnnnnnnnnnnnnnnnnnnnnnnnnnnnnnnnnnnnnnnnnnnnnnnnnnnnnnnnnnnnnnnnnnnnnnnnnnnnnnnnnnnnnnnnnnnnnnnnnnnnnnnnnnnnnnnnnnnnnnnnnnnnnnnnnnnnnnnnnnnnnnnnnnnnnnnnnnnnnnnnnnnnnnnnnnnnnnnnnnnnnnnnnnnnnnnnnnnnngcgacgtacagctgggatgagttctttgatgatgctgatactgattgagtgaaagggtgagcacttgggcaagatgtttaagtccaaaatcggtagtattttttgtacaaattccccttggattgcctcgggggtagataaacattacagatttccagtccaacatgtgggaaattgaggggtagtaggatataccagagatagtgagataataagagttcttcggtattcatgatattataataagactacgtacggttcgctgactgcattcaactgactattgatagtacatttattatctctggtttatagagccaaagttcggatgttactattaataattacggcggtttggccgagtggtctaaggcgattgactagaaatcaattctcttcggaggcgcatgttcgaatcatgcagccgtcgtactgtatcttctttttatttttattatttctatcttacccgtcctacattactactctgtacagagtagttaagtattaagtggtctgtccaaggagtttttgttttgtctcttttcgttgggatcatatacaaccaaggatacaaggtataaatcttaggtgctggtatgaaaattggagtaccgccttcccaatctgatgcaaatacaaattctgccatatattctgcctacttttgcattttaatcacaatatttaacctaatccttacagaggaatgaagtagttgataaggcagttgacgatgaagcatttgatgcaagatatgataggagtaacttaaatttgctaggagtttacatacgaaatgtaggtacctgtcatatgcagtttaatacaaaagaggtttacaaattaggaggcggtgaagagagcggtaggcagaagcaagattgttattcaaccaaattacgaaggcggtactgaatcctcaggcaggagagtgtgtttatactgaaagggggatgttctgacaacaagggggatacatagtacattttctcaattagaaaaattacaaaaaaagaattatagcacgacggctgcatgattcgaacatgcgcctccgaagagaattgatttctagtcaatcgccttagaccactcggccaaaccgcctaattattaagatagattcaaaaatttggatctataagccagggacaatcaatgtaccatcaatcatcccatcctagtaactagtgcggagtaccactttcaatattgctcctctgcacaaagcatttgtactctatactttgtacacatagaataggatagttcttgtttcgtagtaatatattgctctacaggcattgggttcgtatttggattagatctatggtgtagagtcgttaatacttcatattttttttttatatacacctagaaacatagcatattgtgtgtaccaggtctggctaagaatgtataaaagattacctaggtgatgtggtaggctttttgtctagtagtcgaaaaattcaatactaggtttgagtcgttcaaatttcgtatgaaatggacctaaatctataaacatcatgagctctattgattttaattgactatagcaactgcaaactttgaggcctcgagaggggttaggttattcaacctgcatataccaccgggtatcgccaggtagtatataagatactctttcttatatgacatagaactacctatataatgggttcaccttactactttcaaccagacttcgacaactgataaaggcctggtcatccgtatgtcttaggatatagaattcaggcgtaacattatcgagaacgaatcacctgtagtgtgctattatttgtcatatgtcaggacttagaatagggaggcaaagaccaattagtcaatagcctgttcatatttcatatcgattactaaagacaccgtgaccattgaaccttggaacctctattattccccagtgtctctgcacttttgtattagtacctagtaggtaccatgtcgggtcagcaggcgtgatccctaggctgagtaacatataactgagatatattccacgcttagtacgatcgagttatacccatggattcctgctagtaccttggtaggtgcgcagcccaggtgatgggaaatttaaaaccttggatactgtactacaatatctacacatgtacccactatggatatatcccagtacaagagagcaacattaaaaccttggaactgcccaggtaggacctaagtactaaatcaagagcatccaatgttatttttcataaagcgataggttcctacttgtttctgctactaaatttgtgaactgatatcttgacatggatactcatggttatcaattgctagcagagctatgaatacgttatgaacatgatttgtcatcaattacggcggtttggcccnnnnnnnnnnnnnnnnnnnnnnnnnnnnnnnnnnnnnnnnnnnnnnnnnnnnnnnnnnnnnnnnnnnnnnnnnnnnnnnnnnnnnnnnnnnnnnnnnnnnnnnnnnnnnnnnaccagccatactcggtgcaggaggtctacgtccagcccaaccatattgtcggggcaccgttaagtcttctattcgttgctatttacgaccgaccgccaagaccaggggaacatgatatccctctcaacgccagtggttttcttgaaatcactaagatgctattctgatatgctctattttgctattgggctcactacccatcttctctagatacttcttcgattttctgtgtatcgttaattggaatatttctacaaagaactgtacctctattgacctaaaatctattccatctattagggatctagtacgcatattatccttaatggtccgagctattatcacgttgagcttctcgaggtcgaagtagttcgtgaattggtttttttttgtctattgtgtgccaatagtgttttatagtacgaaaagtggatgtaatttaatagatacgtaattatctactactccgtagctaggaaataattggagcttttaaacgagagacctaattagtatgtccatacggagtactctgtttcttcgtgcgtgtaaaacatgcacgtaatcagtgtgctttgtagtggctaaggtggccgctcactatatcaataatggcggtttggccgagtggtctaaggcgattgactagaaatcaattccgttcgcgggcgcatgttcgaatcatgcagccgtcgtgttcttttttttctttcatttttatactcgatccatgataccgcatgcttacaaccttaccgtgttcttattttttattttcttacaatacaccatacatggaggacgccgctattcctggcctctacatagataccaaccaataccgtctctgtgcctgttaaccccctcgaaccattcaatccccgatctcggatgcatcggtgcccacctcgccacatcaaccgtggaagcccaagctcttacccaagcattaatgctagttgggttcaataacacgcaattgatattcatgaactccaattgacatcctattcgtcatgacactcaccgtttcccccgaccagcccattgacctccaaatcggctggcccaaccccgcgctcctccccgcctccatcctttccgactccgctacgaccgtattatccactccctccattgcaaacccagccctcctctacggccccgacgaagggtacggaccgctgcgcacacacatagccgcatggttgagtgatttctatcagccccgcgagccggtctcagcgcagcgcatctgcatctccggcggggccagccagaacctagcatgcgtgctgcaaaccttcacagacccggtctacacgcggaatgtatggatggtcgcaccgacgtaccacctggccgcgcgcatcatggaggactccggcttcgccgggcgcctacgcggaatccccgaagatgacgagggcatcgacatcgcggtgcttgagagcgggctgcgcgctgctgaggaaatcgccttgcgcgctggaaacaccgagccggtaggacaagtcttgatcctatgactgagtgcagtcactgtgccatgccactgtaccatcatttgttgagttctggactgatactgcccctctttccctgcagaaaatgaaaccgcccaggccctggcgcaaaatctacaagcatgtcatctatgctgtgcccacttttgcgaatccctcggggaagattatgtcgctgcggagacgggaggcgctcgttcgtctcgcccgacagtacgatgcgctgatcgtgacggatgatgtgtatgatttcctccagtggtcggccaagccggagggagaggagaattccggggaccgcgcatgtgttccgcgtattgtcgatgtggaccgctacttggatggtggtccacaggatgaatggggacacgcacttagtaacggcagtttcagcaagctgatcgggcctggtgcccgcaccggctgggcggaggcttccgaaaaggttgcatatggattatcacaaacgtacggggcactgctgggatgacttgactgaccaccccccccttctcggatatggaatcgcagactgacccgatatcgcttgcagaggctcttcccgatcgggcggcgctccctctcatttgtgcgccgctgtcattgaccagatgttccctacaggcattattcagaaccacatccgggacgtcctccaaccgaaatacgccgagcgctaccacaccctgctagcagggatcaacgaacatctcgtcccgctgggcgtcacaaccccaccaaccgctgccgcggccggaggttactttatttggattggtctaccagcgccgttgctcgccgccgacgtagcccaggcagcgctggatgaagaaaatctgcgtttatcgccggggcatgttttccagatccccggagacccgcaggtactcgatgaggagtttgcagatcatctgcgcctctgttttgcgtgggaagagccacgacacttgagcgagggaatgcgtaggctagcgcgtgttctccgccgtatgactcgtacccaggtctaggtattgtgcgccacttcacccacttcacagccactccaactggagtgtccactagacgcgtggcgcatgaaaagtacataacttcaacatatagacaatttacaacgtagccttgccagctcataaaaaccttcgagttgggtattgtacggagtactgtacattttatatcgtaacgttgaggctctgcgttgggcattactacaacatagagacgcgagttggctgggcccagggttgggccattttcagaacccaataccgccagcacattgaaagtcatgtacaaaggttgtataattctaccagagaacaacaggggcaatactaattagacacgagacaatttaggatcagaggggcaagccaatcccgagcgggtcctccgactcagggggagtaaagagcaaagcttggcctcgacactttccccctctttatttgaatcaacgccaacccttaagttgaccgtcggaaattccagaggtcgtggccttgtcctgttatgagcttggcttttggttctccgtcatcaggaatccttcaaaccccccggaatgttcatccataacttgaccccctgacaacacgcgggggatatacgccgctttgactcgacgtcgagtcttgtgctacaggtggaattacacagacacagatacatacacagacatatgcaaacatgcattttcaagcaaaaggaatgaacagccctcgatctgcaataaaaaacaaatacgatgccagttctggggaatcgcggtatcatcctctcttctcttctacacggcctgaacaaagggatccactcgagtcaagggcatggtgatacgcgacaacgtgcaatgctcgtcctgtccccctgtgagcataacccgtcgcagatgattggaatggatgaccgacatgccctgtttggggtatgaattcaggttatatagcgcgtagacccgtagtctgtttattctcgtctgaatgctgtttgtgctgttctaccccgtaccctgaacagattgacctggaaattgccaaccactcgaagcgatatctaagtttcgattcgaaacatttgcaagcgccagccatcttcagcgtttcaactgcagaccaccacgtttcaagcgaagacgctgtcaccaggccgggctttctgattggtggggtgtggtggactttagggctgtggcgcgtgtgattggctggaaaggggaagtttgcaaacgctttgccttataggtatgattctcctcccgtctctatggtcgtggcctattttgtgtcgttctttccttctcttcttcatttctattcattccattcattcattcgttttttcattcatttcgtcgggcaccactctttgtcctgtctctattttgggaaggaaccctgcattggaagattcactctttaaatcttctttgctctcctgcatatcgctgctggtcaagcgttggactcgattcttattccgatatccgcagtactggttgctgaactatctcattccctagacatacttctttctacttcgctgcaggttcagcgttatccattttcaatatggccgttctacaaacctccatcgcgatctttgtcgcccatatcatccttttgctcggtttaccagcctctttggtcgcagctgtgccactctccgtgcctgtatctcctgtgaacaacgtcttggccactaccgaaaagagatccacctcaagctactgggtcgccaatgttgagcgtcagggtgttgtcccctttgccacgagcaccgactacaagatcttccgaaatgtaatggactatggtgctaagggtcagtcattcatcttacttctataccctcgggcaatatgctaactatgtcccaggtgacggttctactgacgacactgtcgctatcaacaaggctatttcttctgggggccgttgtggcaagggctgtgattcttctaccaccactcctgctatcgtctacttcccccctggtacctatgttgtctcgaagcccatcgtgcagtactactacacccagatcgttggtgacgctgtcgaactgcccgtcatcaaggcctccgccaaattcgcgggtatggctgtgatagatgccgatccctacgaggacaatggcgacaactggttcaccaaccagaacaacttcttccgcgccattcgcaacttggtcattgacctgaccagcgtcccagaaggctccggtgccggtatccactggcaggtcggccaggctacgagcttgcagaacattcggttcgagatggtcaagggtggtggtgacgccaacaagcaacagggtatcttcatggacaacggatccggtggtttcatgtccgacttgactttcaacggtggtaactacggcatgttcctcggtaaccagcagttcactactcgtaacctgaccttcaacggctgccagactgccatcttcatgaactggaactgggcctggactttcaagtcagtccagatcaacaactgcgaggttggcctcaatatgtctacctcgccttccaaccagactgttggctccgtgttgctgctggacagcaagctcaccaacacccccactggtatcgtcactgcctggactcagaagagcatccccgttggtggtggtgatctgattttggataacgtggatttctctggctccaagattgctgttgccggtatcaatggcaataccatcctggctggtggctctgttgtcgacaactgggttcagggtaacacctacaccccgtctaagactgtcaccaagcgcgccagcgagtctgagcctgaggtggtcaccgttattcagaccgttacggagactatcatggcctgtcccgcttcctacggtctttccagcaccagcttggtgagcagcgacgttcctgccccggcgaagactgcgtcacttgaatctgctcccgctccttcgcctgttcccggtgttagtaccagcagcgattctgatcgcattgctcagacttcctcgatctctgtctccaacagtgtcctttccattctcggatcctcttctgaggcctctgaagtctctgagcccacttccgcagctgctccttctagtgaggcccctgccacttctgtggtgtctgttgattcttcgccctctagtgtggtttctaccaagcaatctgctctgcctgtcgtctccactgctgttcctgtcacctccaatgttgtgcctgtcacctctattactgcgtccgtcacctccactgctgcgtctgctaaaattactagcagcagctctgcagttagtcaggccacccagtctggtagtgacagcagcactgccacttgcggcgcctcgggcgccgttgcctccgcacgtacccagagcactctgaagacttcttctaagcccgctagccttctcaatggaggtgctatcttcgagcggtccaagcctctgtacgaagacgtcgccgcatcctctttcgtcagcgtcaagtcggctggtgccaagggtgatggaaccactgacgacactgcggccatccagaaggtgtttgacagctacaaagatggccaggtcatctactttgatcacggtgcctatgtcatcacctccaccgtcaagatccccaaggatatcaagattactggtgagatctggcccatgctcatggcatacggcgagaagtttgccgaccaagagaaccctgttcctgtcttccaggtcggccaaaagggtgacactggctctgtcgagatgagcgacctcatcatcaccaccaagggcgccgcccctggtgctatcctcatggagtggaacgttgctggctcttcccaaggctccgttggtatgtgggatgttcacttccgcattggtggtgccgctggtactgagctgcagagtgacacttgccccaagacccctaagcagaagaccacccctaataaggagtgcatggccgccttcatgctcctgcacatcaccaagacgggcagtgcctatctcgagaacacctggttctggactgccgatcacgagctcgacctcaaggatcacaaccagatcaatgtctacaccggtcgtggtgtgctcatcgagtcgcaaaaccccgtttggctgtggggtacctcttcagagcaccaccagctgtacaactaccaggtctcgagtgccaagaacgtcttcatgggtctcattcaatctgagactccgtactaccagtccaacccgactgcgctgacccccttcaccccgcaagactcctggaacgaccccgacttctcgaactgcacgacaaactcctgccgcaagtcctggggtctgcgtgttctcggctcctcggacgtcttcatctacggcgccggtctctacagtttcttcgagaactacgcccaatcctgtctcaactctgaggactgccaggagaacatggtcgaggtcgactgttcggacgtcaagctgtacggtctcagcaccaaagcctctgtcaacatgattacctcatctgacggcaaggctctggtccttgagaagcctaataagagcaactactgctccaccatcgctctctttgagcaatctgcttagattactcttctttcctttctatcattctttttctcattctgttctcgttcattgttgtaaacaataccatttaacttcttttgtacttcccccaacgttatatgagattcaatctccatcttctgctcctatatttctgtctagacacttctttctcttaaacttttctctgcgtcggatgcgcgctttgggggtcttttgctcgataccattgcattcggtttcattcatgggatcattactagacttttgtttcctttcggtatcacaatatacaatgccatgacatcttacgacctttagacctgtagcttgtttgtcatccggagtcagcgatgttaatttccaatattagcataagttcccctgcaatatacatagcgggtagatcataaaaaccccgtcggaacccgaagccatgtgggtctgatacgtctttcgtgcttatagtctcggagtccaggttgtgattttattagcttatttgcatgatatctctggtcacccacaaccccagggaaacacggcgtactccgttatcgagaaaaggaggtaaacggagctaagagaagtgacgcaaccaataagcactagttggtaattatccttggataccattcgccaggcttatatcttctagacctcattgaaccgaatgtggctgaatcatgacagggtttatcttcaggcctaaaaagaaaaagcaaaacctcgagacctcatggcgtgcaatacttttataatgtcgatgactccctcccaagagatacagatgcagacgcatgaccaaaacgagtcgaaaaagcccagtaaaccccaacgtctcccattccggacatcatgcgacccctgtgcagcttctaaggtgcgctgcaccaaagagaagcatggatgttcgcgctgtgtcctaaacggctctaaatgcgtgtatggacgctcgcgaagaaaggggaaaccgtcgaacaagactacaactgaactcgcccgtccacctgttcatcctccgtcttctcgagtccagatgtctccagctcctctagctcccttagcccctctagcacttccagccctttcggctctccctatccttcctgaccatcaaccatcctggcccatgggcccgaatcatcaccagcccaactataactacaactctacttggtatcggtctccaccatccccaacgaccaattatccaaccccgaccgaatgggagagaacatcaaataccttgcctccgagcttgactcatcaatcaccgggtgagaatgcagggactctgcatttgcccaacccgggatatacatggcctagcatggtccggccgcgagaggtcccggaagacgaccaacacgagccttgcatcgcggtagcatgtcgaacgctctcctcgctgtacgaattcgttcaatctgactgtgtgaatggacacacagccaacgatacccaatctcgcaatatgctccaaccaccaaccctaagggaatcccccgcaaacgatgtcgtgtttcgcatgactcgatccgccacggagacggtttctcgattattgaactgcaccgggagatcctgcgcacgggatccttccaagctcctgcttctcgggtctgttcttttgaaagtcttaacttggtatgaagcactctatcaatctgagattggcgggccggacacttcgtcgttggataatcgcgaatatgcacgcttgcagccacaaccatatcatttgaatggcaatacaggtctctcgcgaccgtttggaagtatgaaagaatcaatacttgctatcccattgaccaccccgttgggtatcgatatggttaatatctcccgcgccacggagacaaaaatgaaagcccaagtactgctctgggaggtgcagatcttatctcacgtgtgccaggctctcgagcatcgaatacaggctgctgagagcatacgcggtgagaataatctgtgcggacaggcaaatgcctatttatcgcggaaggtgggcgagctgcagcgcgctttgactgtggtgtgtacgccggtaccgtcactgggatagatgtcagatcgagaggatacatacatacagtatagaccaactcggtgcctgggattttaatattaatactgaataaattatggtacattctgttcttggtacaattctcgcgcactatctagagttctcaagaaattacaggattcatcatagacaaggctctatatatcgaaagtaacctattcgctctctccatcatcgcaagcagccttatcagagacacatgtcgagatattggcaccgggagttgaacgacacttgtcgaagatctcttgacaatcgccctcagcggagaccacgcgcaccgggtgtcgcaagtgtagctttgcgcgggagttgatctggccgtgtcgacacgcctcgcggtcggagaagcaggtggacatgttggcgtctggggcagtgacgcacttgttgtaggcgtcgtcgcaggtagaggtggtttgggttgcggtgatgctggttgccagggtgagggtgaggagggcttttaggtggaccattgtggaggtttgaggtttggattgtggtagtatgaagatgggtatacttgagatgatggaactgggtttgtggcgtgatgggtggcttttatagacagtagttgcgagcaatattgctttggttgggacaaggggctgacaaggggtactgtacattgaacttcagctattgaatgcatgatgagcgatggtatacactgtgtcgatcttctgaaccccacaactcgagcatgcggtcagttggatgagtggaaatagttcctgcactgctagggaaactcgatgtagagtgtgtatgttgatttcttgcgctgtagagagaatgtcgcaagagatgctgttgtagcttgtgatcggagagattaggcattgtagtgtgcagcaatcgagatcacattccaggtgcgtcagtgtgagatctataggactgatcaacatgatcgacacaagggaaatctggcgctagtctctacctgcaggttacctgatactagttctaataattcaatgtccggtggtttcttacaagaagcacaatgttgtactgagtactgatgatttaatattgcagttaatagctgttctagataatgacttgcttggtttcaccataaaggctactcatcctgaacaccacgtaaaggtgcaagtcttgttcaggtgccacacacaggacccgtgaagctgggttaggaaggagggggagggggnnnnnnnnnnnnnnnnnnnnnnnnnnnnnnnnnnnnnnnnnnnnnnnnnnnnnnnnnnnnnnnnnnnnnnnnnnnnnnnnnnnnnnnnnnnnnnnnnnnnnnnnnnnnnnnnnnnnnnnnnnnnnnnnnnnnnnnnnnnnnnnnnnnnnnnnnnnnnnnnnnnnnnnnnnnnnnnnnnnnnnnnnnnngggggggagagggggggagggagtaatcatatcaaagaaagaaggaacaacaaacacagagggctatctccgtgaaaaagttccaaaaagtgggttggagatgaagacaatgtgggcagcagctggacagtccgtatccacagaggtcagtcggagtacgtgactggtagagcattgttacctcctcggacatgcttcgtgccacaacctaacctgatatccacagagaccaaagtcaaaagaataagaccactccaggaacgaggtgtagtgcggacctagagtggtacgaagaaggaagaaaaaaggaagaggaagaggggggagggggttgggttttataccctgggggtggtgactcaaggcaatgggggaaactgcggttggtgacgatttttgaccaaaagggaaagcacccatgagataatcacatgtgcacatatcacatggttggagacttcaggctgtgttccatcatattctcacccaaatagctctacagccagtttttcctagtcgcttgggaactatcagtaactgctaatcgtcgacattctgacagtcaatgcttggtttattaaaactgttcatcgggctgtccctcaaagagaccattggacactgaccaatgccgacgagggcccaaagaagatatggaaaggcactatattctacagttactgtatggtttcccggggaactttattcattgcgcaataaaacaagaaacagcctaatcgtactcttccgaatagaataacacaggacctgaagaacttgaagataattgaaggagggtggacttcgtgttaaagctgtccaaattgtcaagcaaactttttagagctcctttttcacggaatgctcaggcttatgggtggtctcgtagtcaacatgcacataggcacgctcaacgtcgggaagcgactccagcttaatctggagctcttcagcaacgtcgtgggtagcacgtagggatgcctccgcgtccatgacgacatccacctcgaccagcaggcgagggccagaggtgtatgcacggacggtgtcgatggcagtgatgacaggagagtgggtcatggctgaaagagatgttagtgaatgctttatcaagagctagaagaaccgaaagggaataaacataccgatatacgtgatgagttgctgcatcttggtgtcggcagtaacgccgacgagcaactggaactcgccataggcggagtgcagccacagcccactgaccagcacggacagaatgatagcacccatgggatcgatccaccaacgcagcttactaccaccgacggaagtcagaataccgaacccgttgatgaacagatcgttgcggtgatcctcccacagaatgcggatctgggagacctggttgcgcagggcccaacagtaaaagaagagggctagtttggtggcaaaggcgacagcgacggcaatgatggagggcaggtggaaagactgggtttcttcctcggagcccgctgccagttcgcgaatagagaaggcgatgatgatgaaagagaccgaggtcataaggaagcagaagcagatgttgcccgcggtttcaatgcgggcctttccagcggggaacttccgtggatcaacgcgattgacggccttgttgcacagcagaagggtcatgttggacatggggtcgaagacggcgtcggccattgtggtaaacagagagagcgatccggacgaaacggcaccgtacacctgaatgaccgagagaatgatgttcgcggcaaaactaccgtagacagcaatccggtacttgagacggttgtcgacgctcagctcgcgggcagcacgtcggtgctcctcgacgggtttcagcatgcgctcgatgttttcattttgggactcgtaaaacccctgtagcttcttggtgacgaaggcttgctttccaagacgggcagtgtctcccactatgtctcccactctccggcctttgttcgcagtggtggaatcccgtttccgcgaggtattggccttcatctgtcggatctcatcctcggtctttagcttcgaggccaattggaacggatcgctttcagaggtgtaacgtggcggcaggctttcttcatcactggaactaccagttcggtgttggtgaatggtggtgagctcatgctcaagggcggtggtggtcccttcgttgatggctagtggaggcattctgtcactccggtgtgacggtgaaccgctatgagtatgatgcaagtgttggaaggcatgaggatggtttgagagactgtggcgtagatgttcctccatgatgaatgaattgaatgggatgaattggtgaataggacttgagatgaaagaaactcttcataccagggaaataattccaagattcccctgtggctgagcttatctgatgccccaccatagcttcttggcacctcgctgtcggggtggatgtatcacggtcgctggggtcggcaccccatcaccagaattcctaattgtgacccaataaacacccttttgaatactctagaattttattgctcataaaatggcagccgtgaaaaaaaatcggacggaaatccgagctccacgagttcagacgctaaatccataatgtttgctcacgtgataaatcacgtggtcaaactccccagcctcccccttcttccatcctctgggcatctcttcacctgctccaccttctcctccaccaaccatcatcctcatcaccatcatcaccatcatcaccatcatcatcatcccgtaaaggaagtactgttctttgccgtccttgtcgccagtcctgccattcctgtgttctcataggactctccgatttcacttgttgacttcggattgggcatgtgctcgtggccaggccgcaaaagctttaccactttgctcttctcttcttcttcttttcatcattcattctacatttcacgcgagtcagggctgctcaatactatttgaaagcccgggtgggagggtttctcgattcttcgagggtcttcctgtttaatccagcgaatatcgcacaatgaccaccagatcgtcaaacccgctctgggtcctgcagaagacagtccttgtttacacacccgatttcaaggcttgttgttctgctcgccttcgtattgcccacgataaaaccgccaaccgaggatctatctcccttcggtttacggcagagcttgctaacttgagcggcagatcacaggtgctgacgttgaatatcccaccagaaatagtcgaaaaatgtgaattagcccggataagcaacgtcggcctctgttcatctgatttgctccccaagctcccggcgcccgtgaccaacctttcggccgtctcaacactgagtctgatactcaataagactggtcgttttctttgtccatctggggtagagtctttaagtccagccaatcaagaagacttagatcttgacgcatttgcgaagatctgtcaatctacatctcttcgtctacacttttccaaacgacaattcgtggaaaaagaacttaatcagctagaatttttctcgggtgctctccggagtcttcaggcagagcattttgactacgctcggcatggcgtggtgcagaaagattggcccttcagtttgttgctcgatccacccccgtattctgaggagcgggtctccgaccgggtgaagcaggtggatccacccctgtattctgagcagtctgagcaggcggttggaaaacggcccagaggtatcttgtcacttcttatcgtctgtaatttgtcattcaatggctcattaatagtatctagacctatggtcaatgtcacctgacgatgaaagacgaaaaagactgctccttacatcccctgaaccactaggctctcccacggaagtcaatacaccgagtactacacactccccgtcggcctcaatccgccccacgtactttacgcatacttcctcccctggccgcacaaagcgtaacagacttgcgcgccttgaagatgaacttcgtggtgcttccgatgactggatccgccaacttttaatccgattaggacgggaacatctgctggccacaccacaagatgtagacagtgaccggccatccgagtctgagaaagttagatttgccaatgttgggatgatggagagccaccttaaacaatatgtcgatgaaatgattgagcgccgtctcaaatcacatattgtcgacgagattgtcgatagagccgtgagcgagtgtcgtgaacagatcttcgatgaatgcaaaatgcatgaagccggacttggtgaaaaggtcgacgacgctaactccgagatacacaatacggccaatgagtgtatgaaggaaatggaagcacaagcgcaaaagcacatgggcgacatagaagaccacgcgcaacagtacctgaatgatatcgaggatcagggagtcgagatcgaaatgtccgcggagaaaaatgccgccaagctcaagcgctggttcaattctgcccagtccctacttgatagcaagtccgagccgggcacgaaggctagacgcatttccatttgatttggtacttatctttcttaggatcgtcgtcgtgcacttagattttttattagtctggaaaggtaggtgatgaacgtatttctaaacgagcaggcctgccaaatttggtcctgggtgcttaattactatatttacgctaagatgcgggggtcagatgagttgattcttacggagtaatgcttaacagaattatatatcgggcacaacacaacgcagtcactatcgcggtccccgaccccttctacacatacccaccgaccacatttggggtgtaaaaatgcaatgtgcagtacaagtggctagaaattgctgcgggggacaatttttgtatgggggtgggccgtgcacgaccatttcaccatacaaagtgggccactttctccaaaagctgagtgacatttcgacaatcggctcagcgaactggcgaatcctgaaatttaaagctgcagccctgtcaacgcagctttctgtattagacacacgcgacttgaattttgccatgatcaactctcaagacaggttctagtccgaaggccagaactactgcggcaacgaaggtcgatatgatgttactggtgtcgcctttacactctacgagctcatcacgaacgatacttccttctcggatatcccctattgggatcgacatatagacatggtgcaaagtattgaatggatcgtcaatcgcgaacttgattcttgacgtatcgaagtttcgcaacttcttgagcgaatgggtagcaacgcgaagatccgacggggatatggaaaggtatctcaaagcaccacagcgatttatatggccggacctaccaacatcgcccgaccacgatgtaccattcgagataggcacaacctagaatggaaagccacactggatgactggccaccggtctagattcaccgcaatggagatggggcaatattgctttcgctgggagaggccaccacggagccgctcgtcactcgaggctggaaatagtgtatagtcgatcagaatactggactgcgaaatgaagatactttcaaatgattggcttcaatcttgtgtactcattacctagtcccgtggctgtcaaagagtggaaccacacggtaaaatgatcccatagttcataaaatattctggcatcctgacattatgacttcaaagattctatgctagatttgatagtgtgtgccgacttttccagctcccgactttcttcttcagacagcttgatgtcgataacatggtgggccccggttcggtttacctttttcggcatgctcaacgcgatttcactcacgcctgcaaaggttccagccgttgacacagtcataagcgtgttctcattcctgagtatagtctccacgatcctcaccaagccagcagagataccatagtccgtcatgcctttcagcttgattatctcataagcagcattcctggtgtcttggaatgattgtttcatgatatcctttgcatcctgaccagcctgctgggaaaactccgccaacgggatacctgatatattggcccgcgaccacactggcaattcgctatcaccatgctccccaacaacgtctgcatgaatgttactcgggtcaacatccaatcgtcggcctagagtgtcgcgcaagcgtgcggtgtccagaacggtaccggacccgatcacgcggctcggcgggaacccagacaatttccagctcaggaaggtcaagacatcgactgggttactcgctataagaaggatggtggacggggccatttgcgtgacttttggaacaatgtcctcgatgattttggcattgatccgtaagagatccaaccgcgactgtccgggcttctggtttgcgccagctgtgattatgacaatcgctgcctcagagcagtcttcaagatcaccaagtgtgatcttggtctggtgtgagaagggagctgcatggttcaagtccattacttctccttcggccttgcgtcgattaaggtcgatcaggacgatttcggctgcgagaccactcagaagaagagcgtaagcggtagaagccccgacattgcctgcgccgacgatggcgattttgaccggcttttgtaatcagtatgggttcaatgcatttatcaagtgaggcttcaaaactaacatggagatcgatggcaattgtaggcttctttgaagaatttcgggctgaattggattgcattgtgtgtagagctttgttttgattgcttgctgattgctttctgatttgactattagatatgatatcaatcgcgactatttatagtcaaacctcctccgtagatcgaacttgcccctgaagtgaaacgagtcaacacgtcacataattgaagctctagaatccatagagcttctcaattgtgtcatgtacagacgcatgacgaaacaaatatttttgccacggcatgatcttgctcattgactttgttttcgtcgatcaaaatggctgatatctatggagtttactcggtatatcctgttccgtctcggccgacgtggctgaagagatccaaggtagatgaactgaacttgcaattacacagacggttataaaaaagtcgatacgcatccaagaaagatgaagcagtctcatgagaactcccttcgaaacctcaattgaacattacaaaagccgttaaaatgagaatcgccgtgttcagtgcccagccctatgacaaggcatcgctggatcagtctaaccaggcattcaagcatgagatcacctatcacgaggcaggtctaagcgagaagactgctcttctggcctcgggcttcccagccatctgcgtgttcgtcaacgaccagatcaacgccaatgtgattcacaagctggcggagcatggcactcggttgatagccctccgatgcgcgggattcaacaacgtggatctcgctgctgccaaaaaggcggggatcacggtggtgcgcgtccctgcatattcacccaatgcagtggcggaatacacactcgggctggttctttgtctagaacggaaaatccacaaagcctggctacgcgttcgggaggaaaactttgcactcaatggccttctcggtacagacctctacggtcggacgatcggaattgttggtgctggtcggatcggctcgttggtcgctcgatctttccgcgccggccttggttgtgaagttcttgcgtgcgatatcgttcagaatcctgagctggtttccatcggcgtcaagtacgtgagcaaggaagagctacttcgacaagctgatgtcatttgtctacattgtcctttgacgccagacactcggcatctgcttaactcggatactcttcggatcaccaagccaggtgtcaccatagtcaataccggccgcggggcattgattgattttgtcgctctgcttgacggactggaaagtgggcatgtcgggggtgcagcgctggacgtttatgaatacgaaaagccgctgttcttccgcgatttatctgagcagatagtttcagaccacaccttccggcggctgatcaccctccccaatgttatcgttacaggtcatcaggcgttcttttcccgtcaagctcttgagtcgatcgccaacacaacgctttcaagcgttggtcaattcgaaaagaacggtcaagtggagaaaagcgtgacgctctgagttagttcagtgtgaacttgacgcggactagattcagccctgtcatttacttgtctatttacttcgtggatctttatgaactaaaagttgtttcataatatacaagatcaaatccaaaaaaatatcgtctacccagataaatgcctccagatgctctagcacagtttaaaagccataatacaacaaacaaatatggatcttaaacatttccagtcccatcaaactaataccaaaataccttggagaatgaagccgtagatctctcataggaggttgtacatcgaaaatcgccacatagctcactatccttggaacgtcttcggccgaatcagacgttttcggtgctgcatcacaccacgtgtagacgtcaaagaaactttataccaatgagcttcagcttggaactgcggttgacggcggtgctggagaggttcacttacatcggtggctagctatatccctcagccttaccacgtcatagacaactataagcggaagcacaatgtgtatagtcaggctcttaatcatgcgtgtcagagcatatgacatgtatgattcacgattgttctagatcgagataatagggagcctaccacgtcatagacaactataagcggaagcacaatgtgtatagtcaggctcttaatcatgcgtgtcagagcatatgacatgtatgattcacgattgttctagatcgagataatagggagcctaccacgtcatagacaactataagcggaagcacaatgtgtatagtcaggctcttaatcatgcgtgtcagagcatatgacatgtatgattcacgattgttctagatcgagataatagggagctctagaacattgtacttggcagcttgtgccgcgaaacagatttaaatactgtgccttgaacgcgggcacaattctattatcaagtcaatccatattatttttcaattattttctacaatatcacgaacctgttcaccataaatcaccatgactacagtcggaagctatctagccacccgactggctcagattggtatcgagaggcacttcgtagtgccgggtgactataacttgatcctgttggacaaactgcaacaggaacccagtctaaacgagatcaactgcacaaatgaattgaactgctccatggccgctgaaggctacgcacgagccaagggcgtcgctgcatgtgtcgtcacctacagcgtcggtgctttctcagctttcaacggcattgggagtgcctatggtgaaaacctccctgtcattctcatcagtggttcacccaacaccaatgattcaggtgacttcaacctacttcaccacacgctcgggactcatgactttgagtatcagttgcaaatggcgaaaaagatcacggtcgctgcggtttcaattcgtcgcgccttggatgcgccgaaactgatcgactttaccatccgcaaagcactccgtactaagaaacctgtatacatcgagattcctacaaatttgtccaaccaaccgtgtgcgcccccgggaccaccgtcggtcatcttggagcctctccatagtgaccctgccgttctgaaggaggctgttcacaagacagccacctttttgtcacaaaaaagtaagattacgatcttggttggtccaaaagtcaggtctgccaaagccgagggcgctctccgagactttgcggaagcattgggctgcgcggtggcagtgatgcctagtgccaagtcattctttccggagaatcatccccagttcgctggagtttactggggtctcgccagcacgctgggtgctgagtccatcgtggactggtccgacgtgatcgtctgcgttggaacagtctttaccgactatagcaccgtcggctggacgagcgagccgaccgattctatacgcgtgacggccgacgttgaccaggttcagctcccgggagcagaatactctcgcgtctacttgaaagagtttctgtctggactgtcacatctggtgaagaaagacccggcaacaatgctggaatataaacggttgagcccagccgagccaagtctgactgccagtcatacgaatgaaaagctcacacgaaaggagatgtgtctgcagatccagaatatcgtcacctcgaagacaaccctctttgctgataccggcgatgcttggttcgatgctattaaaatgcggcttcccgaaggaaccagattggaggttgagatgcaatggggtcacattggatggtccatccccgcatcccttggctatgccgttgggcaccccgataggcaagtgatcacgctggtcggggatgggtcattccaaatgacagcgcaggaagtatcgcaactgaccagactgcgcattcccgttactatattcctcatcaacaacattggatacaccattgaggtcgagattcatgatgggatttacaacaacatcaagaactgggactatgccgcgttcgtagagtcgttcaatgcgaaagatgggcatggccgcggtttccgcgccaccactacaggagagcttcgtgcggctatcgaagcagcgaaaaagaaccgacacggaccgactctaattgagtgtgccatcgaccgtgacgactgcagcaaggagttgattagctggggccatttcgtggctgcagctaatggtcgtgctcccaaggcataggaatttttgatgcgttatttgtcataatttgtattcgtcattaatatggctgagtacacgaagtatactttcctaatctggcagaaaatgaatgttaccacgtcttgtcttctagagctactccgtatggcttccttccttggtaagtgtttctgctgcgctattccctttttagaaagtgacatcatggcggtgtggactcgacttgaacgcgaacctcgtaaaccaacccccttcttccgcattgcatcagaacctaccctgaaaatggaagagcaaattcgacagatccgtgggcatatcaagagtcagattccagacaccatcaacgacttcctcgaaacggttggaacaacaacaatacgaatacttggcgacactcgacattggagattagccgagttccatacgccgatttgcgtcaacggtcgagaattcggttcgtgtaagccagccgaacgctgaaacttgtttcctcgccgtgaacatatacccacagaagcactcttattcgtgctcttattcgtgctcgatgtcaacaatgtcgactatatctatgagactgcccacaatggcatgaccacaataccagtctatgatcttcgcttgtcgaagagtagaatcagcaattctcagagaaggaacgctagaggctaatattgctaatacctagcaataatgcacaatgggcacgggcatgacccttgcctttggttgacgattacaacgacgtttgtcctccgatacaaaacccccgcaaccttttgtctcgatgacttgaccaagatgctcctgacccagaggaaagagtattccagcactattcaagcactattcaagcttagtgggtcttctcgatatattcacatgggggtgttatgaggcaagatagtggtgctgtgtcacccgagatctgacctcgaagacagattctaggaagatttttatttaagaagcatcagcttggcgtgagaaaaagctttgcaaacctctttggtctggtatgatgacacttatgctttaaatcaatttccatcgcaaactgttctttgtggagaaatcgattatcaaagaagcactgagtacggtacagtaggtcgttgagtgcatttggtcttggtcgaaagcccaaagggtcaactcacgtgcagcagcaccagctataaatgacaatcaatctcctttcatctctctcccactactcactttctccatctaccaaacattattcccaaccacagctctgttctcagacagctcttactcaatccaccttcaagtttgctattatcgacatggctaaagagccaaccacccctaaggccaaggcgaccaaaccggtcaagacaggaggaattgcaaagcgaactccggtcaaagcctctcctgccaaagcctcccctgccaggatctcgctcgctatcattgataaggacgtgatcttcttgtggaaatgtatcaagactagcagcatgaaggcaagtgtctcagatatcttgatacgtctgattaaacacactatagcatgtcaatactgactaggttgtcttacagattgactggaatgctgtcgccaaagagacgggcaagtcgacttcaaccttgcagaagcagttctcgcgacttaaccagaagcttgagaagaatgttaaagttgccgcccccgatgcttcctccgacaaagatgccaatgaggatgttatggttggcgcatctaaagattctgactagatggatcgtgatttcggcggcaatgcagaggtgacgcgacgagggaagacaggctcggtataggagttttgtgttcgtggtcattttcctcgtgattttcactaccgcctcatttgcttttcttcaatttcttattctctttcttgggtcaacatgtgcccctcggtatttttacttgtgacggcagcatcttggcgaagatgactgtgacggtctgagagccttcttaatccaatgaactttataaatttattttaccctaaatttcatagagaacactagtaaatgttggctggtaaacaaggtcttaagacattcaaagtgacattgaagttgttgcagtataagagccatccaaggtacccatgaatcggacaatccatgtccaactacgtcctccgatgtccaagtatgtccaagtataagccctgacacgtccaacttgaacaatccagccataagatgacctcattcctgcatattcgtccgagcccctcacctgggcatttatttaccccgccccttccagctcaacaatctacatacttcccaccttaccccgaatcatctaatccatctaattcatcatgtccaacccctatttcgatatcgaatacacctcgcccaagggccagggtaagtacacccccctatctcatcccagcgacgctaacacgcgtactagtggagaattggggccgaattgagttcaaactttatgacgacgtcgtccccaagaccgcgaccaacttccgcgccctcgcgacaggcgaaaagggcttcggctatgcgggctctgctttccaccgcgtgattgccgggttcatggcgcagggtggtgactttactcgtggaaatgtcagtcacggtatctccagggaaatctgagctccagctaatcttcactttcttctcagggaacgggcggcaagtctatctacggcgagaagtttgcggatgagaacttccagaccaagcatactaagggtggattgctctccatggcaaatgcgggacctaataccaatggttctcagttcttcatcactgtaagttggaaatgaaattgatgggagatgtcttgttctgactggattagtttgtgaaaactcctcacttggatggtaagcacgttgtcttcggagaggttgtctctggtcaggatattctcgagaagatggagagcaagagcttggatcggtctggaaagactgatggtaccattaagattgctgcttcgggaacagtctaagctattatttggaatgtgctctcttctatctacacttactgggtagtaaggcggatgtgaactcgtccatcgtctcatcgatctatgcatgccatatttttttcaagacttccatcaagttagatagaatgaatactaaaattcccggcaaataccattgccaaaaccatgcaacatcagaaagaatcagtaataatactatacacacaagtataaatcacttcacagcaaccaaaaacaaccgcggatacttcaacaacaccctcccatcaaacgaaacgggataagcagcccgcaagcgcctcaaataatccgccaaaaacgcctcctcctccccatccaccaacggctccaaaaacggcctcaaccccgtccccttaacccactcaataatcgcctcatggctctccagcgaatgataataactcgtctcaaaaacatcaacccgactacaaaccggcttcagcagatcatacagctcctgcggcgactgaaacccatctctctgcaccccagccagtttctccttccacggaccctcagcagcagtctcacgcatgagcagatgcgacggctcgttcagattatgcggtacctggagcgcgaaaaccgcgccctcttgctgcggctgtagcagccgtttaatgaccgcgatgcggtcatccgctttcagccagtggaacaccgcgttcgagaaaaagaggtcaactggcgtggctgggtcgggcgtgtacgtggacaggtctgcgatttggaagtcatggtctgggaggactttctttgcgcgcttgatcatgtccggtgatgagtctagccctgttattgttgctgatgggtattgggttgctagtactgttgttgagttgcctgggccgcagcctaggtcgattattctccttggggctgttaggggcacgtgcgataggagatcgcgggcgggctgggtgcgctcgttttcgaatttgaggtattggtttgcgctccagtctttggtttgttgggtcattgttgtggtgaagtgtctgtagactggtcttgggattgggattcttgtagagtgggtgagtaatctcgttgctgtgggattaaggcgacaaggcattgttttgatggtgttaaatactagaagatgtttggctgtatgggcaatatttgtctttatattgatatctcgtgtttaatggggtgaatcaggaagtggcaatgtcggatgttcggtgatcgctccgatatcgctatgaacagcgttgcattaaaatccagaacgatgaaggaagctggtaaatccgacatccaattaccgatatatctagctactagctaacatatgaggtacagatagataagatgaacatgatgtgcgacactacgctgcccgctttttagtggaccgaggttcgcgccttccgcatttaattacccaccaagttgcccaacaaggactcaatccaggataggacatctgcagcactaccagtggggatagatacggccgaggtagtagcggaggcatcagcgctggtagtagggacttgcgccgcagcagaagtagtcgattgacggacagtggtggcgaaagtagtaggctgggccgcaaccgtggtggtggaagtagtaggctgagcagcaactgtgatggagggcgttgtagactgaacagcggccgtggtaggggttttaacaacggcggcaactgtggtggaggacgttgtaggctgaacagcggccgtggtaggggtttcaacaacagcagcagttggggtggtagtggcggcaaccaccgtagagctggaggtcgacgagatcgacgaggttgatgaggtggacgaggtggacgcaaccgccgagctaccagatccaccgagagtgaagtcgatacacgactcgtaggtctggtcgattgattctgcgtaccagtaccactgcaacacacagtcaccggcggtggcacactggcttccaagatcgtcggggatagtgacgctgaagctggtctcgttggcagtgacgccggtggctacggacgcatagacatcccaggagatcaggggactgccaatgacagtgttggaagaagtctggacgacagagacattggccacaccggtgtgcggggcgcgaatatcaacagtgaaggcgacttcctctcctgccgtgtacgactggatgttggcctggttgtcggcgaacttgtagcccttgcacagccagatgtcacactcggcggcgttgtagtcggtctgggtggcggcaacttgtagctcgccttggatgttgccgtacttgtcggattcctggttggacagaacttgctgaccacacgcggctcccattgcagtaccgggctcgcgggctgccgggctggtgacgaagccatgggcgttgaccaaggagatgatactggcgaaagccagggcgggggtgaaagacttcatgtttagtgaattgggatgtcgggaagtgaatgaaaataatcggtaaaccggaccgatgaatgaatgtatacttgatgaacgagagtctgcacggtctcaaaccggagaaaatgaatgtgaatgtgaatggaattcaaaaaagactgaccagcatgctgaactggtcttgccacgctgctatgtcgcttcttatatagtggacatattcaaaaggaggtctacctgagctgcgacattaatcaactagaaacagtagcttaccacttaccagaggcatcatgaacagcgattaggcctggatccatgatgtatcatactgaaacacatcggatatactcaagggacagcgctcccccaccggaagggactggtcagactggcggcaagcacagggcaatatggcctcgggttcgggtgtatattgaacccgactggatgatcatctagagacgagatgttcctcaggctagggtttccaagcctggctccacgcgccgaacagggatgcgccgggtttcacgttgatggagacctcagggctgccaatggcgggtggtgacaggtgagacatggagttttatggatgcttgaagttgattaaagacgtggagatggaagaataaacatgacttggcagttctcttcggacgattttccaattccattccagaattctcccgggtagtccacttggtgctttggaaatcgaactagatccgatgaaactaaataggaagttcatgagctgtcaaggatttcacagtcaaagatcatctgatatttgctgcccaagcctttagcattggacattctcgcatatgcaataccttgtacgcaatgcctccgagtgattagcctcagctaatcccttacaggagacggagtattgtgaagtttgaagttattagcgtcggcttgccgaaattccaccaatcatgacaccggagtattttatagagctgattggcattttcccctacctaagtggctcttggatactggtctcttactctgtgcgatatgcttcaatggaaaatgatagacaatcaaacaacattcactatatactcccaccacccgtgaccgagccatccttcctcgtgtcttgtgtatggcaacagtgctgaagaaacatcagtccacctcagcttctagcgattcaatgaaagatcaaagacaatcttgcccttcgcatgcccctcatccattctcttgaatgcctcttcatactgctcaaaaggccagacgctatccaccaatccccgacacagccccttctcaagcaacttcgaaacctcctctaactgtctcctcacaggctgcatgataaagaacacatctttcacaccttcaacttcaaacccctctggacagacctgcagaggtggctgatagatactcagcacaacaccatcatccttaacagtccaccacgcatcctgaagagccttccccccgacacaatcaacaacaacatccaccttattagaaggtaactgcgtagcccactccttcacatccacaacttgataatcaagcacctccttcgcaccaagagacttcacaaattccacattccgagggccacatgtcccaaccacctccgcaccaagtagcgtggccaactgcacgagccaaatgcccacaccaccagaagcagcagtgacaagaattctctttccagaccaggcaactttagcagcctcaaaactcatctctccctcatttgcaccggtaccaagagcatgaacaaaaagaatctgccaagccgtctgcgcagagacaggaactgcagcagcctggacccagcttaggcccgtaggcttatgagccagctcatccgtaacggcgatggaatactcgcgcgcatttcctggccggctatagtttgtgcgtgcgtacacttcatcaccgggctggaagggcgagtcgtccggtcctgagatgacgattcccgccatgtctggacatgggattagagtgcgctctgttggtggagggaagttctttggccagaggagctcgccggcgcaagggctgcaggcttttatttggatgaggtgctctccctgtgcgtggtttggagttgggaggggtgtatttgttatggtgagggttttagaggcggcggttttttggatgatgctgaacattttggagggaagggagtctgacatgtttggaattcgaaacgttgttattcaatgaggaatgtgctggtggtgtttcgttcttgggctatatagttcaaatgttgaggcgtcatccggccggatatcccgcataggctaattgatagcctatcttggtacttggagagtatatcctaatgttgcactaaattggaactcaactaacctaaattcccgtatttctcgtatcggaaactatagctacgaatcataaatgcccgtcatattccctctcttcgacaaaattgtaaaatactacaatataggggggagatggaagatagacaacatcaactatagagcggtagatatccttttgacgattttagtgaatatgtgtgatattattcccgtttgagacaacgaggtgggctcactaggccaagcggaattctcagcaggatttccgtgaagaatacacactttacattgactcttcctattggtagacaagagtacttttgcaattccgcatgcgagtacccaggcgacatccaatccgagggctcatatcagtcggaagagatttccaccccacaatgccacacatcccagcccacagttcaagcctatggcagcggaggtttcgacgattgcattgcctaatctggcctgtgacatgcacgagcgggatgccatgtgctcctgccatgtggtccaatgcttttcgatccagtagctccgtcgagcaggttccggattctcgctctcgactttgatcgtctactctgctttttctctgaaaacactctacaatggatagaatacatactgagcccgaggatgatatcgccgtggtatgtatactgcttatctctttgatttatgtttctgacaatgttaggatcccacgacccatatcacgaccgtttacggcgatgactggcaatcgtgagtcttatctctgtgcctatatggagatctctcacacaatccagggaaaccacttcgatcggctcctcgctttatcgcgggttagaggagaatggccggcgatatcaaacattgagcaacaaggaatatctgtacgcattggcttccgaatcgaggtattgcctgcttacttcctgccaggattccatcggatgagaagcagttcgattgttacgaagctgggtatgtggaattctcttacatatggtctttgttcaaatggtaactgattattgcagccacttggtagccctcgtcatggactcagaccaagagaacccgctcttccggtcgcctgttaaagaccccaaaaacatcctcgaccttggaacaggtctgggtaactgggccatgtatgtggacctttcattttcataaaggatcactactcaccctcttctagcgatgtagccgacatgttcccaacaagtaagtccggagccccggtccaattcaccatatcaacatactaaccaaaaccccagccactgtccgcggagtcgacctcttcccaccaccagtaacatggatgccaccaaactgcatcctagaagtcgacaacatcgccgaagaatggacctggaacgaacctcaagacctaattcacatgcgcatcatgatcggatccttcagcgacgcagaatggaaacgcgtctacaagcaatgctacgagtaagcgcactttcatccccatccccagctcccataactaacccgaccccaccagcaacatcaccccaggcggctggatcgagcaactagaagcaagcccctacatcgaatgcgacgacgacagcctaccagcagacagcgtcctccgcagctggggcccatcgctatccgcatgcggcaagcgggccggtcgcccgctagaaacaatcgatacaatgcaagacgctctccgcgagactgggttcgtggatatccgtcagaaagaatacaagtggcccattggcccctgggcccgagaccagaaatacaaagaggctggcacggtcaactaccagcattggatgtccggtatggagggctgggctatgtggttgctgtgtaaattcggggcgccgcagccttggtcgcaggaggaggttattgtttatgttgcgaagctgagggcggagcttaagaatcctcgctatcatatttatcagcgcgcgtatgttttcccttccttgcttcttgtgggtgtgggctgatatttatacaggcgacgtgtgtgggcgaggaagcctttacctgagcagggagctcaggcggagactagtgagagtgttactatcaagactgagcagtgagaggatatttcgttgttggggtaagtgaactaggttgtaggatgacatgtctgatatggcgagttgattggaatggctggacgcagccagccttggattggcgtcttgtgctttttggactctttgtaggtgctgtctatgacttcctaccaatgcattcgatcttttgcacatatatatgatagagggacaatgccctgcacaacactagaggacggagggtaagactcgcatgtatttacctcaaaggtgtgtacctagagtatgaaacgacggcgcacgctcctcttctgtgggtcaaacatactgctgaaggtgttcgcagtaaaagctaatgaatatgtgtagtaacaatgtgcgaggtatcatgggtaaagagggaaagagaactgaaagagaaaaaaaaaaccaaaggctatgcgcttgtaaaaatagacaaaaccacaaccagagttgagcgtaacaaaaagaaaaagactgggcgatgacaaaagagagagagagagacgtgctaccggcgatcactctggacctgcgaatcaaaatgcacacgattcctctcctccgattcattcgtggcatagtcatccgcgaatgggttccgcacctggaaatcctcaggcttgtattcatatcggctattagtcgtagatcccccgacaggattggaattgagtgaatgggaagcaagtggccgaccaccagtcatagtcggagaaggcagctgtgccggggattcggagctgcgcgttgaaatgccagctggcgccacggggggaggagagaaattcgtaactcctggcgcgacaacctgcgacgtcggtgaagggctattcaaattggacgagctgggcgacgaagatcctctgatcttgcgcgccttcagcatggcacgctgctgttgcgacagcgccacggagatctcttcgtttgtctcaataagcgtcaacaaggtgtcctcgtccggagccgggttggtcgcgtggatatatccttgaacaacacgcgaaccggttgtgcagcggtcaacaaactccttgatgagatcgttgttttccagctctatcggcggcgtggactggacgaattgcgtgagcagcttggccgaattgcgcgcctcctcgatgcgggctgctagttccaccggcgtggggagggtatttgtcggcgcgcgggacaggccgtatggctgttggtgagggcgagacctaggcgggactcgcggtgggacgacggaattccttgggaaacggtcgatctggctaggttagtcttggacggcgggcacgcaaggtgactatgatgtactcaccagaccgtgagaggctttcgtcttctccttcgcccacatctgaagcagcagtttgagatcttcgtcccatgcgcgttcttgctcgaggctatccagatactggcggagatagctctgcacgttccagtcgcgtcctgtccgcagcagctccttaacggttgtcacgaatttggcatcgaagttgcgtgtgaaggtgtgccccgggttgtcggccaggatgcgcatgagcatgatcgcattgtactgggtgtggttcggggtaccggcggggtcggtgagatacttgcgaatgcgcaaagccgcttccttagcggcattggggctcgactcggcagtttcgacgatttgagggaggtaaacgaattcagttccttgctggagtgtgcgaatcggttgtcagtctcgaaaagggggtgtgttatcatctccgaggcacgtaccgcgtcgtgcgaagatccatccgcattcacattctgattcgattcgcagaaggcagtctggagatgtcagtgtgccttgttcaatctctcgagactaagcacaaaccaatgcttgcaggacaacggcttctggtgagtcttcgctgtattcgacactgtcgctggagcctattttcaggtacaaatcagtaatttgcggggagacgtggagaggagacactcacttgagcgcctgctcagagatcccaggaagcgcttcatggtgatcgcacagtcgcttgtttttggggagggtttttgaaagggaagaaagggatcaaattgctaaagaataatcctagtaggggcccaactgcttcgaactagtatggaactagcaataggtgccctcgctagttgatcaataaaaccgagcagtgagatatatataagtcaatgtccccagcgatcaacgctaccttccacgcacgcatccagataatctgcattgccaagctgagtgccatcaggctccaggcaattaatctcacctgcccagggatccatgatgttttgaccctggtgactcagccacgaacgaaggtaggtagacggtacattgtttcgatacgcattggccatatctttagaagtaccaagtacttagtatcgtatctactctgcttcaacagcatctgccatctcccccagtgtcttaaaccgccaatcaaagatcggatccgccgaattccccatcaaagccccaggccgctcaatccaaaccgacttaatgccgaccttcctcgcaggttgatgatcatggaactggctctgcgccgtctgcagaacctgtccaggctcaaccccaaactcacgctgcacagcactcaacataaactcaaagttccgtggatccggcttgtaactgccaatatcctgcgcggtaaggatcatatcaaacggtacaccctgcaagctgccggcattggacttggcgaatgaagcccggtccacgttcgacagcaccgccagcttgtagtgctttgacagtcggcggagggcgtcgacggtgtctgggaaggccggccaggttccgacggagttgccgaattggcgactttcctcgtccgttggcgggttgaggcctaggcgcgcggcgagggtggggtggattgctgctagcaggtctgagtatggaaggtccggggttgcggtttgttgggtgctctcaagctggtggtaggttgttagaaggtgttcacgggtgaattgggtgctgcttttcgagaggattggtgccaatgcatcgatgatgccgctttcccagtcgattagagtgccgtagacgtcgaagcagaggaggcggtagtctgataggctggtcattttgggttgatcgtgatatatatagggagatggagtagattggatgagggaatctcgaagtgtattctgtttggactacagagtacttatacccccgcatttagatccctgcttatagattaaggaccttggcatgttcctttcccagataaggattgccggggactgaaagtggtataggtaggatttcctcaagattccatatctaccaataaaatccttcaagtgcatatagaggtgaacccgtaattccaaacaccgagatatccactcatcgttacgatagatcaatagatcagataatgcatataaaacagaaaaaataagatcacattatatgaccgaaagatcgaaacctcgacagaggtgtgcagctaaacaagacagaaatggaacactctctatcaaagaaaaatcactcgatagagtcacggagaaagaaccacgtttgtatcatgattggatcgggaagtacagaatcctatttccatcatcctgggccatatcgtttaaactttttattgggttctcctccgagtgttggcatgaccttaaaatcttgtatgatccggtatcgagtccgttccaacatacacagctgatgcacagaactccgatccttcccgtccaccgcaaaaatcttttcacattgcgtaaccacacgtcccctcacaccttcttatggcgatccgtttatgcctcgatgagagcacggcggatctgggtgccacgctggcgggaagagaggcggacctgcttgtcggtgctggccttcttgacctcctcggcagcctcggtgaggatgagctcgatgtggcaggggttggtcatgtaggggttgatctggaaagaaaaggtcagcatttggataccgactcaaccgtacatattaataaaacgtacacgaccgtgagcacggtaagtgcggcggcgacccttgggagcctggttgacctggatgcgcttgatgatcagagcgctggtgtcgagacccttgccatcggcgttggcctcggcgttcttgagcagatcgatgatgtgctcagcggacttcacgggccagcgggccttggagacaccgaactgctttcctgtaaaccgaaaattgtcagtcgatgttcgactccattcacaaattttcatccagattgtagaatgcacagcatcgccaataagccaagaaatccatcctcgtaatccattcatattttcctcgtcatttcaattcatatcccagtggctgtcgtatattggcgatgctattcgtcctccccacaatccgaaactccaatccatccggaaatttcttcaaaagggcgactcaccctgagcagtgcgaccggtggagccagcgtagcggcgcatgggaacggccatggtcttcttggtaacgttctcgaggaaagtgagggccttggacagcttcatgccgttgacggcctgggcagtctcacgggtgttcttgaagctgacacggaggtaagagccgcgcgcgcgggcgctcttggcctccgagatctcctgtgcggcgtaacggacctgtgaaaagcatcgctcgttagcaatgggatcgtcgttgggtgttggtgatgtagcgaaagtcgacccggcgatcggacattgaatgtgcatcacacaagtggcatttcgtagagaatgggattgcgaaaggtcattatcgatgacagggacatgcagcactcaccatcttgaaggagttggcgaggggggtgtgatggtcctcggtgatgagttgttgtcgcttttcgtcgtcgtccggctctcgcttgagccactagatttggtgcggtttttttcgctcttggcgctctggccctaagcgagccctaacgctagccgttttgggtggattacttttgagttatgtcagagcttagtcattgatttctgccccacatctcagccttgaggttcactggtgcaatcaactaaggtgaacatcttaagttgcaactatacttcataaactgatcattgatgattgaacggaaaaattttattcttcataaatccatatctatataccctattttgtctatttcttctgctctggaacctgtgtaataagctcacccttctcaacagccgaccgcatgttatccagcaccagaatctccatatccttctgagtctcataagtgccagtaccaatgtgcggcagcaacataacattaggattgctaacgagcccgggctcaatttccggctcgcactcatacacatccaggccagcagagcgcacctatagaacagccaccagtcagccgcatatccatcatggaagttgaagttcaacgcagcaaatacataccttgccagagtcaagtgccgcaaccaacgccttctcatcaattagcgcaccacgggccgtgttaacaatcacgacgccatccttcatcttggtgaactcattagcaccaatgatgtggcgcgtggatgcgttcaaggccaagttcaagctgagcacgtccgaattggcgagcaactcgtcgaatgagacgtatgtcgcgccggcttccagctcgggtgatagacgggaccggttgtggtactggatcttcatcccgaaggccttggcgcgaattgccatttcctgctcatggttagctgtggtcaggtggtatattactgtctgtgctacatacccgtccgatgcctcccatgcccagaattccgaggaccttgtccttggggtcgtggcccagggtagtgctgtactgctttcctcctgcggtgatcgggccttgccactttcctgttggaggaattatggttagtcaccgaatactgggaaagaatatcattccgctctggttagccacttaccttcccggagagcagtaataggcacgtaagcctggcgcagagcgccgatcatcaggaaaatgccaacgtcggctgtcgcgttgttgaccgcaactggggtgctggacactgcgatgttcttctccgtgcaggcggcaacatcgatgttgtcatatcctgcgccgttgtgacagacgtacttgagagatttaggcaggactgcgagcaactctgcgttgaacggaccggtgtactatgcgttgtcagtcggatcactcgaagtgaaaggtcaggccggtatctaccttggtggagctgttggaccggtagaggacgactacatcgtcatacttgccagccttgcagtttgcgatgaactcttctctggttccgctggggaattcctagttgtctattgagcaagattcggtcgcggcgcaatacgaatcacttaccttcaacgtcaagaatgatgagaggctctcccattccttgcgcgcgtgtgtgatttctccaatgaggagagctgattgtgttgccatgttgctggtaacgttagatgcgccaaatgatgtcagcggggttgctcacatttgtaaaagttctatagggatgtatcaagaaaggattgagggattgaagcgagcaatgagaagattagcaactgagaatgaaaagaaagaagaatttccaagattccagaaatcaagagatcattggaggttcaaatgtccccgctatcgcataacccccatgtcgtaacgggggctcctccgacagtgtcgtggatatagatgtacgggttttatagatcgtattcatacttatacctcaacctagaacttttctactcaatttctacatttatctgtttatacaacgattatcattaacttcatctcttcacttattactccttgatcttctaccaagtgcaaattcaagaatcatcacccccacgtcggctatccaaatctcccctttggtgcaataaccgacagcggagcacctccgggcccaagactttccccccacgacgaccaagtggggtgttttggatgtgtagaggggcaccaacgggccgagttgactccaaatgccgtcagaggtcgggtttcgctacttcttcgctatttacttcaatcctttcttttattctctctgaaactattacctactactctctacacgatatacacactatggcaagcacaaccaccaccgcgctcgttctccacggcgccaaagacctccgcctagtaagtaactccaaataataaccaactcggaccaaactaacccaaacccaggaacaacgcgccatcacccccccatctacaaacgaagtccaagtcgccatccgcgcaacaggaatctgcggctcagacctccactactacagccacggacgcaatggcgacttcgtcgtgcgggcaccaatgtgtctaggccacgaatccgccggcacagtaacagccatcggcagcgccgtgacaaccctgaaagtcggcgaccgcgtcgctctggaagtcggcctcccatgccgcaaatgcgcgctctgcaaacaaggccgctacaacatctgcaaagccatgcaattccgcagctcagcaaaagccttcccccacctcgacggcacgctgatggagcgcacaaaccacccagcagacatgtgccacctgctcccagacagcgtgagcgacgcaggtggtgcgctcgtcgagccgctcgccgtcacgctgcacgctgtgcgtcgctcacacccgccgagcaaggcggaggttgagcagaaccgctccgctggagaggagaccccggcgctggttttcggtgctggcgctatcggcctgctgcttgctggcgcgctggcggctagtgagaatttctccgcgattgtcgttgcggatatcgatgcgcggagactcaagatcgcggaggatatggggcttggtcttaagacggcgcttattcccaggtctgagactccgcctccgccgaaggatgcgccgcatgctgagcagacagcttatgcgctggagaatgcgcaggtggttgccgctgcgttgattaaagccgtcggtgcgaaggatggactcattgtgaacggattcagtcgtgtttatgactgtactggtgtgccggcttgcgtgcaggcggggatttatgctagtgcgcctggtggtgtgctggtgcagattggtatgggaaatcctatccagacgctgcctgttggtgcggccgcgctgcgcgaggtcgatatcattggtgtgttccgttatgatggatctgcgtaccccgctgctattgcgctgctggcgagtggaaagatgcagagtgttcaggagaaggtcgttacccatagactcaagttggaggagggggagcgggcgtttacacttgccgggaagggagttgatgaggaggggaaccctgttgtaaaggttattattgagagccgacggggctctaatggctctctgtaaatttgctgatgaggacgacggcgatgatgatgattgtgtttgaaaatacccgaattgtgacaatagcaaaaagatggatatatatgtggagaggattatgaacaaaattgcatatacaaagttgaggtgatgatcgtgataacttgtagggcgctaaggccatgagatagatttccacttcttatactattcttcataatattgggttgctcatttcaaccctccagccagcaaaagactctgacccgtcatgtagcctgttttcacaagcatagtcacaacattggccgtttgctcgggagtcccgaggcgaccaagcggaatcccagctgccacctcagggatagccgcagcgttaggaatcataccagtgtcaccaatcatggcaggcgccacatcgttaacactgatattgaattcagccagtcgggtagaaaggttcttcatcatgcctgtcagaccacctttagaggcagcgtaatctaaaagagagtcagtttggtattcctcagagaaggaaagaagctatacatacgacatccattgattccaccaccttgcgcagcaatcgaggacataaacacaatacgcccccaattctggctcttcatatgctccaccacccccttgacgagaatgaatgaagcgcgcaagttgacatgtatagtatgatcgaactcttcgagagagcagtcccagatttggggaatccgcttcccgtgcccagcgttcgagatcaggatatcaggtcggtggccgtgctcggtgtcgatttgctggaacatcgtctcgatgtcgtcagcggaacctacgtccactttatgaattgagatatggagctttttatctgcgtatttgctctgcaggtcggtcaccagtgcgttcatggcggtcaggttgctcgcgtatgtcagggcgagatgcactccatgttgagcaagctggtgtgcacaggcagatccaattctatagaattaattgtcagttcttcattcgccgtattggggtgatatgagttggaatagcttaccctcccgatgcgccggtaatgagcgcaagccgaccctggatctcgttaagtgacatgatgcgacggagttgatacgtatgttgacgatatgcaatgatcaagcgcagatgtaaactcttaaacctccaagtttgatctggcaaagaactgcgttgctggcctcggttacccctcggcgccatctccgagggtaaacccccgcaaagccccgcatcatttgccgtcagatttgggggtgggggtgtcacatcataagtaccacacggataaagccattaccaagcatttaaaagagaaggttgctgctcatatctcccatccaagcagacggctgccaagtctgcgagcgtggctctccagattggtacatatcggaggcattctggaacgcatccagccccaacaagccaccagaaatctggtccccggatacataatcgcccacggcctccaaatctagccatgagaagtcattcgcagggctgaatttcatgtatcccgggtctgtgactgggttcggaagggatgtttgtagtgggaagtcactattttgcgtctcttcggttgggttcgatgtggacttgggcttccatagaagctctagaaggcgagcatagcgcgacccgatgtcatcagtgccggcacttgcttgtttgagcacttcagtggttcggatgactaggccttggacttttgcttcttctgatgggaccatcattccgaatgaacgagcctatgatatcgcttagatgatatccagaagagggattgaataggaatcttaccttgtagaggaaaacggcagagtagatgccatatctaaatcgcatgagctgtttgcctcgaaataacacgcgacgaaagaaaaacttacaggtagaagcggagaggcatgaagtggagatgcttctcaggatctaccagatccaccaagattgtcaagtatgacttggccgcatcaacggattcatagatgaaccgcgaatcctgcatcgaagctacattcttgaatgtcgatcgtagatgttctcgctggttttgtaggtcggttttcggtttgacgagcgactgcgagatcgcagcttggaacgcgaaagcagttgtatacagacgcaaatactcgtatgacaactgcagtgttgctcgcataggtggtgagcctagatatgttagaaccaacatacccagcagctcaaataatcgagaaaaggccaacttacagtccaatgacccccaaagtgacttccaccgcagaatcgccagacggaagtcatccacatatttaacatagtctcccatcagcatcatctggttactagtacgcatccccgaatataaaacttcgtgaacattcccatagagctgcgtaagatccaacatagcctgaaagatcttcgcatagtcctcctcgccctcgttaaccggctgcagcgatggaaaatcctgactgacaagaccagtcatgggcccggggccacgagaccagaaagcacgtccaatacgcacagaaatcaatcgatcagagacatagcagctcgcccaggccagacgtctccgtgcctcactctcatggtccccataaggatccccacggaaagacgtgcgatccatgccgatgaaataccccgagcgcaacgcaagcccgacatgcatccacgccgcgcggtcttcctctccgcgcccaacgcgttcaatgcgaggccgcagtccctgaggttcccactcggcgagtaagagaagcgcttcgaccgcttcaacatcacattctgcgccagcggcgatgccggaaatcagctcgtgcatgtacttcgagcagtactcgtggatctcgggttggtcgaccaaatccttggaggcgatcgtcaggactgcggtgagcaggtgcttctcattggcggcgaatgcgtctagcgatgcgcgtgtgaaatacttccgcggcacaaggggaagatactggtggaagttctccgcgtagcgggaaatcagttgccacaccgtttccgggtctagggcgcacgactggacaagtctgtaggccctgatgccagtggttgggttgttgaagtctgagacgccattgcgcaggctgttgtatactgggaatggtgttggctccgaccgaacatgttcattgcggatctcgggagcgatctctgtgccttccgtggcgatgccggtcaagcattgccatgcgtctgatggattgcgcgggacagacgatatcgaggtatcatcttcctcgacggatgccgatgctggcgccggtggattaggtggcaaaaagactagcgggccaggataggatgccgattgcactcgacgattttccgagttggttgggcttgagacttccgaatccttgcctggtgagcgattgaccggtgtaaagttcttgattttgttcttccggattcgacgacctccacgatttgagccgcctaatatgcactcgcggttttcgcgtacacaacgctggcatggtggtttgccgggtttcccattagagtctctgcatgcgatcagcgcggaaccatctatattgcagatgcggggaaagactgcaaggatcgtggccgaaacgagaagaaaagacaatcttacaggtcacatcgagacttgcgttgtctgcaatgcaaacaggctcgcgaaacgcgtttggcgatatcgcgccgtgaggcttctgacggggattcttcttccatggctacaggaacattgaagagtacgaaatcaaagtcggacgtccccacaaagaattccgaagacccttactcatcgccatgctcctctccatgtgggggatgcgggaccttgtggttaaacgttttacctacttttgcctctatggtcattctctaagaacttgatattaactgctttgaatgttagatactatatcagacattgtttctcttcatatgcttatttaatagccccttcatctgttcaagtagggaaaaccacttaccgtgtcaatagccgacggctaatgctctcggctattggtattgcccggagtaaccccgcgttctcggtttggtctgattgggtttcttatttggagctcctcccatttgcttctttgcttctttggttcttttattttggatttgattccttttcatattcatattcacattcacaatggcagacgtgatgtccctattctccctaagcgggaaaaccgccctcgtcactggtggaactcgaggtattggccaagctatggcctttgccttggctgaagccggcgccgatgttatcttggttcaggtgagttatttacacgcaaatattggagagcacatgctaatatactaatagagagacaccagcaacacagcaaccaaagatgagatcattaatcgcatcggccgtaaggcatggatccatgtcgccgagctcggggatcggaaagccgtcaaagcaatcatccccgcattgcttagccaaggactgaagccggagattttggtgaactgtgcagggatccaacggcgacacccggccgaaaagttcccggacgaggactgggacgaggtgagtcgataaagcaatataaattgcccccttgaaacactatatctaattcgtggaataatgtataggtcttggaaatcaacctgtcctccgtgttcatcatgtgccgagaatttgccgcatacctcctggctcgcgacgcctctgaattcccacagggtcgccgaggctccatcattaatgtcggctctctgctcaccttccagggtggaattacagtccccgcctatgcggcatccaagggtggcattgggcagttgaccaaagctctatcgaatgactgggtcgccaagggaatcaatgtcaacgccatcgcgcccggttatattgccaccgatatgaacaccgcccttatcaacgatgcggaccgcaacgccggtatcatggcccgtattcctgctggccgatggggaaaccccgaggatttcaagggtgccgtggtgtatctggctagtcgggctagcagctatgtttctggagagatcctcacagttgacggtggatggatgggacggtaaatgtttggaaatgaatataacgtacattacttcgataaattgcacatataaatgaattcttttggcttgtcaggtgtcatgagactattgccagactagttaactatcgggttattgcctgtaagagggaagaggtaacagtggcccgtgcgtccacttgaaacctcgacaacgccaatgtcttacagtcaaaccacctcagccctggagagacgaatggcacatgtcggcttgtgaaagtggcataattaataatgtctcagacttcatacactatcgtccaaggcgtcacgcccagactcgaactaggatcaacaaggatcgtcagcaaatcatcagcaaatcacacctatctcagggggccgctaaggcttgttagaaacaccggcgtctttagtgtcaccaaggagctatcccgataggtttttcggcaatttaaacgcctcgaacagctgcaaatcagaccatataggggctttgcggaagatatgtccatcggggtccatgcttcttctcaaaactctttcagggaggcttcttccacttccatttcttccattattcgcactcttttgtcttagaagacaatcggctggtctcgattgttaaatacactctctttactatattgtctggtctggactgcctctatattgtccaatttcattcttaaaaaggaaaaaggtgccccttgcctgcatgccagatacctgaaagtgaatctccaacgtcgattcttggtgacgtgccagtttctcacaaattccaaaagagcagggctgttttggctcgctttgttgacttcaacctggtcattcactttgagacaaacctcattgttcattgtcaaccccaaacagaaccagccacaatgctcgcgttataagacattgtctttgtcggaaacaatcaaagaggtctccatctatatcgacgcactttctccaaccctgtttataatccatttcatctgatctatccaccgtattcgacttcgattccccgcaaacgcccacatccaacatctcaatctttacattttgatctcggctgttgagcagctgcttgaaacatacacatacacattgctatatcgactaggcggttgtgcaacatcgacagcacagccttgcatgtttgctgcccagaccgcaacttctttctctcttcgatatctgcgcctgttcaatggcagcaacccatccgcatatcgcggcacgagggtacgggtcaaacgccacatacatatatgagtactcaagggggctgggtggcgtggacgtccctcgcgatgtgatctttacccggatcatctacggttccctgtgtgtcgtggcattcgcactgttctgtggccgagtcgcccagatcagccacgcatatctccgccaaatcaccgcaactagcgcaagcaaacaccagcagaccttctgggcccaggaacaatcaacatggtggtcaaacatcaagaaatacatcctatacgccccattaggaagcaagagacacaatcgagagttacagctttcttccgctgtcaatgtcggcactttaccctcccggctgcagactatcttggtcgcactctacttcgccagccaagtcgcatactgcttcatcctggactatagcgtcaaccacaaggcggccttggtcgccgaactgcgcggccgatccgggacgctggccgtcctcaacatgatcccgctcttcctcctcgccggccgaaacaaccccttgatcccactcctccacatcagctttgacacatataacctcctccaccgctggctgggccgcatcgttgtcattgaatcagtcgcacacacagccgcatgggccgtcaacgccgttgacgaggaagacttcacccgtatgctcgctcgcgtacgtgaaacccccttcttcctctggggcctcatcggcacagtcgcaatggtcttcctctgcctgcactccccctcacccatccgccacgccttctatgagaccttcctacacctgcaccaactcgccgcagtgttcgccttcctaggcgtgtacctgcacctgcagatagacaacctcccgcagcaaagctgggcgaaagcgatagccggaatctggataggcgaccgactcgcgcgcctcttccgcctcatccacctcaacatctcaacctccggcacaacaaaaatggtcgtgcaagccctcccaggcgaagcctgccgcgtgaccttccacctcccaaaagtcgtgaacatcgacccaggctgccacgtcttcgcctacatccccaggatctcctggtggatgtcgcacccattctcaatcgcatgggccgaaccaagcacaagcagcacatcgacattctccccctccccaacacaagacaagcgatacaatgacgttgagaagcaatccgacctccccaccaagccctccaaacccagcacgcaagtctccctcatagtcggcgcccaaaagggcatgacccgccgcctctacaacctcgccaacgcagccccctccaaaaccctcactctcgccggcttcatcgaaggcccctacggctcaaacccagcaaacttctccagctacggcacagcagtgctcttcagcgccggcgccggaataacccaccacctgctgcagacccgcgcgctcgtcactgccgccgcgcagaacaccgccgcaacccgcaaagtctacctgatctggtcggttcgatcgacagaccacctcacctgggtgagcaactacatggaccagatcctgcgcctgccgaaccgccgcgatattctcgttgtgaagcttttcgtctcgaagccgcgacgcgccgctgatatcgtcagtccgtccgctacggtgcttatgcattctgggaggtgtaggccggatgtggttcttgatgagattttgcccgggcggaccggcgccacgattgttagtgtttgtggaccgggcgcttttgcggatgaggttcgctcggcggcgagggagaggattgggaagggggctgtggttgattttgcggaggaggcttttacgtggtgaggtttgctttgttggtttatatgctttttgttcttttgccttgtcttttttttatccccgtggggtttcttgtaattttttttggtttaatgcactcttttacttcttttgtgctgcggttggcgactcatataacaaacattgcttaatgtctaactgtatactatcactatcataatctccggacttttcctggttacatatgaagatatcttgttgagaacgaggtctactgtgcaagagatagtaattgggaatgtagtagacaatgtaattgaacaagaggctctatgctagtgtatgtattatctcgggcatccctatctgcaagaccaagtgtaatatgtaagaaaaataatgtgcaacaagaagagcggaggattagagatggcggtctaatgcagagtatcttttaggagaaacagtagccatcggaagcccgttaagtgtcaagaagagaagaagagaaaagaaaagaacccaagagatgataaaagatcaagcagtcttagtcttcttgctgcgggttcccttgggcacacgagcaagccagtagataccaacagcagcaaatatgttgaagatgatgtacgcccacatgatgccgaagttgcgccatgcgtcgctgtagtaactcagcacgcccttgaggaaagtatcggtcttgtcgacgctgcagaaactgcaatcgctagtggcattcgcgttctggaggtagccaccagcaacttccatgtaggcgctcatgtattggtaacaggtatcgccggcaaggggctcgaagtggagcatctcgacgggctcgcagacgacgtttgtgccggatgtgccggtcgacagcattgcggagacgaggtaggtgaatggtgagaggcggtacatgaagatccagaagcggggcatttggtccggggtcgcgaggacaccacagaagatcagacagagggagaatagcaagttggcgatattgccacctgtttcggctagctcgataccagcaatcatcatgtgggcgaaggtgcaggtgaagatcatgaaggtcaagacgagaagccacatcagtgcgccgcgctcgtggagatcatcggcgctggtgttgcgttgcagtccaatggggtagtaccagcagacgaagatgaggaccgacatgagggcgttccaggggagttcgacaatgatgtttgcggacataaaggcttgccaggagtatgatttggaggggcgttcacggacttcgtagagggagcgttgggtgacaaagtgcggcatgatctgttgcaccaagttgccgaagactgtcatcaacatgaagacactgaacatttgattctgcagtccttgtatactgttctgggcgtggaagaaggagaagccgacgtagagcgcagtcaaggtacatagcgcaatcttggaatagatgtagactggagttcgccagtactggctgaacacgcggaggagacactgccagagttgaacactgaacggtgcggcgaattcgtggaagctggtaggatcgttgtcggttgtggcaacgggtttcagagagaggctggacttaagctcggcgaggtgattttgcacttccttgcgctcagggctatcgcgccacacggcaggccagtcgatctcactgtgggttccgggggcagctccaatgacctcaagcatccattcggcaggattggcttcaggcgacagcttgggcgcaccatttcgttcaaagtagttagagagcgtagaagatttttcgccaatttctccgaaatagacagtcctaccgcccctggcgaggaataggagacggtcaaatcgctggaagagcatagcagacggctggtgaatagtgcagagaatagcctgaccgtgcttagtcaaggtatcaatgagatccaagatagaccaagaagtttgactgtcaagaccggaagtaggctcgtccaggaataaaagcagttgtggcctggcagctagctcaacaccaatagtaagacgcttgcgctgctcaacattcaaaccttcaccggggacaccgactacggcatccgcatagtgttccattccaagaagcttgatcacttcctcgacgtagtcgagtttttcctggcgagagacgtgacgcggttgacggagaatagcactgaagcgaagagcttcgcggaccgtggtagtgtggagatggagatcctgctgttggacatagccagtcttacgttggaaggagtggtcgcaaggacggccatcaaccaacatttcaccagaaacaacccccattgtcacgcgcgtagcaagcacatccaagagagtggttttaccggctccagaaacacccatgagagcagtgcaggtaccgggcttaacccagccgtcaacgtggtcgagaatgcgacgttcctctttcttgatgtggatgtcgtaacacacgtcttgccattggaagatagcagtttgtctctggattgcggcagtggtttcttcgccgtagctagcgccatccttcttctcggcaggggacacgctgtgtgtttgctcgacatcatcttcagagctgccgaccttcttgggggcgtagccgcgacggaaaagcagaacctcacccttggacttggactcggaaatgtattcggtgccgatgaggtaggtgcacatgaagaaaatcatgaaaccaatcatgattcccagatttctccacttgtggccgtgagagtactggaagcttgcagtgtagtaggcctcgccgctgatatagtcctggccagccacagctcctttcgctccgcagatcttgttgtaccgaccgacatccgtgtaggattcacccaccgggatgaaagaacccgctttgcatgggaaatcgcgaccgtggaattcgttcacgatcaaggtttcgaaaccataagcaatcgggtcaatgtagttcatccagcgagaccagccaagcatgttgcgggttggtatagtgaagccagtgtagattaccagaccgagaatcaggatggcggcgggcactagagcctgcgacaaagtacgcgagtaagaagcgatggtacggaagaccatggacatggtcatggtcgtcacgaaagagaagagcagaaaggtgaagaaagcgccgccggtttggcgaagaccagtcatgaaatagagtgtgatgttgaaggtgaaggcattggtgattttgtacggcatatcacacagcattgacgagattgcttcggcaaacggatgatacatagcgtaacgggcttgcttttcgacaataggacgttgcgcgtagagagtgagaatctctagagcactggagaacgagttgagaagaacggcgaagaagagaagggcaccgcgagagtagaaactggtcacgtcgccaggcaactggaagaagaccgaaccaataatcaatgccataatggtgtttccaatcaaggcggatatagtcagactgtagtcacccttcaaacgctggaaaccacgggtcacacagatttggacctgctcggcgactgatagggtgaatggagacttgacacgctgcctcttcgactgcatagccttgcgagactcgacgaatttctcgtaggactcgccgccaatgggatactgctcatcgtactcggcaatctccttcagaagctccttgtacgcagcactgtttttccaagcagtggcgaactcatcgggggtacggggaacgacgttctcaaagccaggtttgacgactcgctcagcggggctcgtaagcgaggtcaggaaatcagcggtagtctggcgctcgggacactcgaagcccatgttggtgaagaattccttggcctcggtggtacggccgaagtagatctgtcggccctcgtatagcacagtcactttgtcgaaaacatcgtaggcactctgggatgcctggtagatagcaacggcacaggtagtgcccgagtacttagacatcaagttcaatgtcttacagaactccagagcattggcactgtccaaaccacgagtactgttatcccagcattggagagggctgccgcagagggtggcctcggcgatactgacacgcttccgctcaccaccggagacaccacgaatgaaatcgttaccgacctgggtgttgatagtgtgcgaaagaccaagcatagccatgacgacatcacgcatatgctctgcgtattgatcgcgagtgacgcccggcaaacggttgcgcggggcgcgagcgagagcagcgaacttcaaggtatttccaaccgaaagctgagggaaatgcacatcggtttcagcggtgtagatggcctcaccgcggaactggctgtgcatctgcttgtcggagattccttggtagttcatatgagagttaccatccttgaagatgccgttcaagtctcctgcaatagtcttcaagaaagtcgaacagccagatccaggacggccgagaacgaccagcatctcgccgctcttaacgaggccatcgaagtcgcggaggatctgaatcttctgcttgccagtgccggtcatcgcacggaacacggcgccgatttgcagaatggagttggccacatccttttggtaatcggtggggctgccaaatccgtgcacactgaggtttctgaaggccaggcccgcctgacgcttcgggtatcgttccgggtcgcgagattggatggcaaggagattcttcatccaattcttggggttgaaattctcactgtgaggattgagggttgagtcctcatggacttcgacgaaagggttctccgcattctgggttgagacagagaagtgtgttgactggcgggtgagttgccgggccaggcgagtgacctcggcctcggtgtagtcctcgttgccaatctcgcccttctcattagcggtgtcatcggtgctcacgctggcggtggggtcatggcggcgagcttccatgttggcggaatgggaatcctctccgtcctgggtgctgggattcaatgtccctaggagcgacatgatgaccttccagcacggtcactgtcgaataggggatggaactgattaagtggggtagtaatccctagaaaagacggataggggagggaaccatcaacgggatgagtatagagagagggtgtacgaatattagttaatagaataacgaaggaaggcaatcagcgaagaatttgaattaagtacggatatgaaaagacacaaaatcccaaggattcaaaagatctagagatcgggactcggaaaagctgtatcctttgcccggaaagaaaataaaaaacggggactcccgtcgaaactgactccggggcggagctggtgactttccggagattccaatcacgaattttggtttcgtatttttctgagactttagctagtccttagtggctgattgccaagaaactgtcgccattttccttgaatttgttgtccacagaggtaaggtagagcatgcgatggatgattctacactgcatgtacctggtacttccgcacgacagccaaacaaagattacctaccaggcataatgatgtacctgccatgttcttcatacatcctacacgtgtccatgccaggtgggaaaacaaggtttccagactcagcagcccgggaccaccgctatccgtcccacacagggctcggatgctcgggtgcgatgcatccgagcggggctgactcagctattcctgggggatccatggatcttagaacgctaaatcgcatgtcacttccacccactggggcaattgttaattccatcttatctccgtcccctaaccccccgtacttggcctcctaaccccgaattacatggatgtatatgtatcttccaaggttgggaaggaatggaccaaatccggctggtttcttctgagtcatgtctccggttatgaaattccttgcaaatctgacgtaccaacatgtggcactgtcagatacgtgctgatgaacccttgcatgggggctgttatgcggcatgatggttcgttgatccttggacgagcctagccagacgctaggctgcaatgcttacgcttacgccgtgctaaatacggaatatgccttcggttagcagacaatttcaaaatgtgaccagaatgtacagttataagtcggccacgcagggaaagcgaaatattgaatcataatagtctaaattgtacattggatattgttaagaaaacaacagcggtgtgtcagtcttggtcttccaaggaacccaattatggagaccagtcacattcaagacatgtcggtcaccacctcgtcatcatctgcatcgtcttcatcctcgtcgattggttccaccaacagattaccgccacgcccaatcttctctctgatcgaccctccctcatcaacagcatacactactcgaggcatcggtgagaccagtcgaaatccgtagtggtgcacaaacccctccggcgcactcaccacaggacgctctgtatcctgctcctgtaagatctcgtagcactcaaccaccgcgtagatctcttcaatgtctgcatctggcgcaaacttacgcatgatgcgctcgccggacgggagccgcacgctaatacgaacggcatctttgacatccggcccgggctccgcgctaagcgattgcccgcgccaaagcttccactgggcgagatcgcggagccgttgctcttcagccgcctgtcggtcagcggcttcctgttcttcgcgttgacgtgccaactccgcttcccggcgctggcgcgcccgttcacggtcgatcgccagcgaccgctcgtaggctgagtcttgctcttcgcggaggctgcgcgaggcttgttgctccgcgcgtgaagatcggagtcgctccaggggctcgctgttagatgtcacgactgtccggagcttgttcacgacctcggatggcgtcgtgagacctgcgatccgtcctacaacagacatcgcggttgatgaaacatttggtgtatggacgatgaccgctgcaaaggggaatttggtgcatttcaatgagttggcgacttggtatgcttcggaatctcgcacgttgccgccccacaccaggaggttgttctgggggtcattgatgaattctacgacctcaggtgccagcagagtatcccggacccagctgtccgtatcgtcgtgctctggagataagagaatgaccaggaggtacttcaagtcgcgatgggctttctccagcgccatgttgtatccgttctccaggaatggaatcgggatagattcatattcttcttcgaactcgcggataaagcgagcggcagtatctttgggaccgagggatcgacggccagtggtattccggcgagcaccttgcagcgcggggttcgctgtcctgttaaacaagcgtggcaaaaaagggaagaggacaccaaataggcggaatgaactgcaaagaattcggtataccaaattaaatggagtgagaagtaggctaagaataaatggaggtcggtaggttggctggtctgccggctgtaagttaactcgtggcgccaaatctgtagctgtggcacgagcaacttgcgacaagtgttcggtcaaatcgtcggtcattaaattctgggttcggcgattgggttgggggggaggggggcgatccaaggcagcgcgggcttcttcaacgggatctgggccttcgccatcaaaaaacttggatatggcaatctatcatgcggggatcagttaaacgctcgtacgcttgactggaagtcggggaagatagaccaacctgcacattccattgtgaccgacgtagtagcggaattgcttcggaaggttcctgactggtgacagccatgtacatttctagcgtagacttctcgctatcagaaagcccgtccaggtcaacctcgggttgtgacatattgttgtagaagggccgtaagccataaactcagggatagaggtggtatcaaaagagagaaaaaggaacagccatgaagcggaagatcatttgaggtcagtcattaagcacgtgcagaatttctcatgcgtaaatggtaagaacgacgtgacgtcgaggctcaagtggcctcaagaagctctcgcattgatgtcctgaccgcctggtccgtgcttatcccccttcgctcgagttcggttctcgccccgcgtcttcgtttccatcagttctgtcgcttttaatcattccttgggaggagagacgacttcggtcttatccttatatcccattcatgcctattgttatcggctgagataccgcccgacgtccgtgggctctcccggaattgacccgccgccaattgcgcggaccgtaggtgacttgctttagaatcgaaacaggggaatgcggttttcacccgatagcattctttgttccctaccgagtccggtttcaatggggatctttttgcgctgatccgcaccaacaaagtgggtatcagctagatatcatggcgtctgccggaaagcctccattggaggatgctcgtcggacgacaggatcaccgaaaatgaagagccgtggtgagtgtgattcgaagtcaaggctggcatttcagttccattttaggactgagatgggcaagctggaggtggatgaattcgagatggaccgagttgctgataacaatgattttgcccgatagagaatgcgaaagacacattgtgccgtaatgtgaccatctatgggcgatgccgctatgaagacaaaggtattgcgaacctgaatcacggccagcgtgggtggtgaagctgatttggaacttttgtatccaggctgtgctttcaatcatgacccgtcgaagctcaatgcaaatcagtcggataggtgcgatgaacacttggtctctatacgacaactggatgtattttgctaacaaggactgtttcgtttgatagcaagaagcggttcaatgtcgactcacctagcttcactccatccttgctgtctgggaatggtgtatcagcaccaaaaaagtccacagctatatctcccaaagctgccagtgcagctccttttcaacctcgaacaacctcatcacgtatgtgctccatgtggagagggagggaggttccaaaagcattcactgacgtcagaaaaaggttcaaacacgagtacaccaacaacacggtcagaagcagtgcaagactgggcggtggccgatgtacaggaatttattccccagggatttgagcacgtggtcagtcgtccctgcccttatcactcgattcgcatcgatttcctcccctctacctcttgtcttcttacccatccctctttacctgcactagccctattgttatcatcatctctatcatcacgatggtgctaggtggcttgtctgccatggcatctgaattcgatcctgaatcttctgattctccccgatacttcacctctcatccgcctcagcctgaaagccctgggtggttcaacagtattctgagcaatcgtgctaattttcctactcagacgcctcttcagggtaatggaaacggaggcatcacccccacgggtgcatttgatccttttgttactaccccaactgccatgactcccggtgccgttggccctgtttctgccaatccttactcccacgaccatactggcgccatgggaggtgctttctttgcaaaccaaactggattccagcagccggtacgttggtttccattggatcctctttgtttctttgactgatctccaactgcccaacagatccagtaccatctttatgccccaattggccctcacagccagaacacattgggataccagcgcaacgttcatgatctttttattcctaacgacttgcgtgaagaactgcagaagaaatctgcagctactttacaaactctccctagtatgttagacatcacccaataataatttttactcatgctgacgaacttgaagacacccaactccctgcccaggtcgactacttccattccctcgtccctctagatctcagtcatcagaagaatgctgcaatctttggctacccgagctggatctacaaggcccagtctagcaaagatggcatctattatgctcttcgcagacttgagggtatgacaatcttcccgtctcttttgtagctccaaactaaccgtgtaggttatcgcttgaccaatgagagggctatccgttccgtgcaagcctggaagcgtatctgcaacgccagtgttgtgaccattcacgatgcgttcaccagccgcagcttccaagacagttctttgatctttgtgaccgactatcacccactgtccaagacccttgcggaccagcatctcagcgctggaacccgcttcccaggccgtcagaccaatgctcatattcctgagcagattctctggggctacatgacccagatcgccaatggactcaaggcgatccacgccaatggtcttgctgcccgagtgctcgagcctagcaaggttttgcttactgctaagacccgtgtccgcatcaacgcctgcgctattcttgatgtggtgcaattcgatacccagcggactatggctgacctccagcgacaagatctggtcaacttcggccaaatgatcgtcacccttggcgccaactcacccactgtcatccacaacccaaccaaggccatggagcatttcactcgcgcctacagcccgcagttgaagagctctgtgttctggctgttgaacagtctgcagaaggatcaggagcgaagcatcgacacttttatcactggcatctcatcccagctgatgtcaacttttgattcggcactccacctcgatgatcagctgaactctgatctcggccgtgagttggagaatgcacgacttgtgcgcctgatggccaaactcgggttcgtcaatgaacgccctgagtatgaacttgaccagcgctggtcggagagcggcgaacgctacttcctaaagcttttccgcgattacgtcttccactcggtggatggccaaggtgatccggcggttgatcttggccatgtcttgacttgcttgaacaagctcgatgcgggaactgacgaaaagatccatctagtcagtcgcgacgagcagagttccttcattgtcagctacaaggaggttaagaaggctcttgagtcttccttccaggctctgatgaagcctgctagacgcatgcactagcaagttttcgaaagttctcacatggtactcgtaaagatatcgcagcttgctatgtttgtctcatagtttaacccaagggttacatcttttgctttaatttgcaagcaccgatatcgccaccgtgattgaaatacaaacataggaataaagaaattcaaattgctttccttggtcgtaagcctgtagacatctctcacaattctcctcgagtcatcccgtagacgcaaccatccaatctccctacaagctcctcaatgatcagttccccatcttcatcttcattttgatcctgaatcttcctggggggaatcaatacccgatccaaaacatgcaccacgccatccctcgccaacaaatccattcgtccaactctaccaaacccattaacccgcatatcaacctcaccaaaccccttcttaacatcaaccctcaactccctcttcaacaaagtcacaagccgcacattcgcatagtcctcctctagtccatccccacgtccacccttcccctcgccctcatgcgcatgcccaccatggcgacctgaaaacaacccatgggacgttccaagactactatacaagacatccgagtaaaacgtctgatttagcacaatatgatactgcatcaacgtacgcaggcacccctcaccccgccgcgagaaaagaaaccgattagccttctctccgagccgtctgaaagcgacgttcgtgggcacgaaggttgtgccgccctgtcgctgcgccgggtcaagattgtgggcgagtttcgtgcgagctagcgccaatgtgaaggtgctgaagtcggttggtgcttggtgcagtatcgtgcgtgtctctcggggtgggtggaggggactggttattatgtggattattccgtttttggatttcttaggtgaggttagtatctgtcgatgtgtgccataaattgatgctttactcaccatgtcggctgccacaaccctactcctccggttcaacatcactccgttctggtgctctcggacaacgatcctctgtggtagagtcgattccagagctggctctgtcagcttcgtcggtagcgtcccgtggccagcaatatgctcgattgaaaattgaccgggcaggatatgataccgcagcaacttggacatgagcttcggactggggccatttcttccccgtggaagtctctctagggcacggttcgtcagcgcgaagaaggtgtggtttgccgtcgtgccatttaggatatcaatcaggtctttgtcgtcggcgatgagctcggcgagtcgggatgtatgctcgctttctctgatgagctcccatgtcgtcttgtccgcgtggcagaacgggcctggacaagcatcgattggccggtgtggacggtgtcggtatctgtcccatggtcttccgtcgcggtcgtgtctgtcttcgcaatcacctcggtatccaggccattctccgtgttcgggccatcccccatgtctgggccgatcaccaccgggccatcgcccgtagccaagccaatcgccatgctccggatattcatcatcatcgcgccagtcaccgtctcttccccagcctctatgttcatccggggagatgcccagcaggctcatctcggcatctgcttgagatggatcattcgtggctggtcgagtctcagagactatctccgcgaggatactctcatctaggatgacaaaggccgaggccaatgaagctgccacagataagaaaaggtaagtggaacgcataatgccgttatcgacaggaaatcggagtccaatgcagatgctcgatcacacaatggtgatgtacctatataggaaggcctccctcgtcgaacccctcgactttcttgatcttcggttgtacgagtcgtacaaagctatcacactacatcagatagcatagatgaaactgttaaatcctcgctgatccggtcgtcgtaccgtggagactcgagaaacaacttggatcaacaagagcaccagccatcgctgagaatatgttacatattccaatcgagaccagaagcagcggaatacgaataggatacagatattcggactatatttggcagtctcagttccgggctaacttgagatcttgcattcacgtgcaattctaatcttcttcttactagaacgaaaaccaggcagtatcggaagaatcggttatacacgtcaagatgtatttctcacttatacctgtttttccatatagcatttaatccagatccggcacaggcagcccattgacaatcttgactttccgtcctagcttgtccagcgcgaccttggagttatgcgcacgcaactctttcgtctcttcgtcggagacaagcacaaagtcatatgtaaggagagcatggccctcggggacattatatttcctagcgatctccgcgtccgccttaccaatttctacagtcaaggaatccttaacgccgaagaccgcatcagatgtttcataagggtcatttcggagatagagagcgctagaacgcagattagcataccatagcccacacaagtcaaaaagggcaacagcccaacatacgtaaccaaatggtcaaacccctccttctcaaacataaagtgcatatgcgaaggccgatacggatgccgccgcaacatctccagcaacctcccaacaggcccatcatgcggaatcggatacggcaccggcgtaatcgccataaaccaaaacaccccgtcttgatccgagcgcataacacacctcccatccggccccaccctcccagcatactggacatcataatggcccgtcgaatccgtctcccagatatcgaccttgacgtcgtgcaccggcgccccctgcaaatcccgcagcgagcaaacaaccagcaacggctcgccgtgcggatcatgcgacatggacgcgccggcgggcatttcctcggcgtcgtgcgtgtggaacgggcccagcacggttccctctgtggagcccttcggcttggggtggtcgattgagtcgacgaggatcgagaggcctaggacgtcggacagcaggatgtattcttgtcgtacgtctgtacaggcttggccgacttctgttaggaagttgaggccggtcatccattcggcgctgctgagacgggtttcgcgcgcgaagtcgtggaggtgcgttactaggcgttcgaggatgtattttaggcgtgggtctgggcagaggctgttgatggtgattacgttcgcggtgatgttgtccacggtttggtctttcattggggggatcttgattttggaggggtccatggtggggttttgtagatgttgctttgaagtgtagaggggaatggtagatggtgaatggtttaagctggaaaatccggggttaagctgtttatatggtatagaaggtggggtgtggttgtttactttccccaggagatacaagttctctcaatcaatcagacgctctcgaatgataaccttcagattgtttcaccccgcaatccccgctgatccccccgtcggatgtcagatcggatttatatgccgtagctcttgtatacgacggggaaacctatccgacgggagtctttagggcagagtatatatccggccccacagatatctgaatccattctagtgtatgacacagaccaacgtagatcagaggccacgggcgtcgggcattgaagaagtagataatattttacatagtcattctaaaggagataaagtagatatgttcaatgagagaagaaaagaaaaaagaaagaaagaataacgctaaacagagggatatctaacatagtactcccacacccaacccattgccaatatgtaaaaacaaaagaaaaaagtacaaatcaatacacagaaaagtcgatattttacgcatgcaccatacgccgatcacgatcacggtcacggtcacggtcacgatcagcctcacgttcccgttcccggtcccggtcataagaaccagcattagaagccggagccgggcctgaagcaggaataacaccggcagcagcactcatacctgtgtgttctccacgctcggcaccaagctccctcttctgcacagcggcagcgacgcgtgtgtgatgatcaacagtatccataatagcctgtctaagacgttgattggcatcgggatcttcgtcctcggagcgatccgagacacgaccagcagggacatgagggcggtccctcttttctgtctcgctcactgcccgtcgcggggaattatcacctgaaggaagctccatcgggaccgcagagccaggagccaggttcggggccgaaggggccgactcacggcggtgttggtagtaggcgttgacctctggctcgaagggcggctctcggggatgctcgcgctcggcggagatcgggggtagtggacccataaaccggggtggggtgacgtttgagctggagcgatccttatcgggacgctcgttggataccgttgaggtggtgatgcccgcacgcaatgctgccacttcgtcttctttgacgtcgcgccaggagcacttggcgtgtttcttcgtgcagccaacgcaggctgtgaggttcttgagacagtccatgtggaggcggcggcagcggtcacacggtgggatgacgcgctcgccgcgctggagctcttccatgcgagctatcatttctagcttgaaagggcccccgtcgtctttttcttggtggattgattttggcggtgggaggagggatgatggggtgcttgggatggcgactggggttgccgtcgccgggttgtaaagactgtagtctgctggatcggaggcacggggccgtgggagtggctgagggttggctgctggggctgctgcatcttcatagccgcgagcgtggcggtcagccgttgtgaaaaacctcttcatcagatctgcacgggtggttggggaggcacctttgatcgattgtccgttgatcatggtgacattatcggtggattgtgagaacatgaattgagatgattgggatgtcacagggttctcctcggtgtgctcgggttcagggcgatgggcgttgacagcgacgaaaccagacggagaggggtgagatgatgatacatggccgttacctgagccatgaccgttggcatcgcgccacacttcggggacatttcgggattgcgtgtgtagagaagcatcgttctcgcgtcgagtgacaatagcattgcgacgattcttcaaacgatggttaagctgtcgcgctcgagcagagacttgaacacaaagattgtcagtcaactcctaaactgatatacatagtgattccttaccttgatcagccatctggatgatatggtacaagttcttttcaagaatctcaagcgcgcctagctccttttcctcatcctcgatgataggctgaggtgggatcatcttctgcggcatgccagaggcaatcaaaacgaagtcctcctcgctgatttccacgcgacactgcttggtatagaactggcagactcgcacgccattgcgcgacttctccagattgaattgctcgggcttattctttgcgaattcgaccacatcgagccaggtcaccgtgggtccgtctttaccatgggatttcaacacctgcggcggtccatcgaacagacgctcgaagcgcttgatcaagatcggaccgagcgggcatgcgcccagatttccggcaatgctctcgtgacggtgtagaacgccgtcgtattcgccgagtagatggatgatcgcgggcatggtatcgtcgatggagacgagtgggaggttgtcagggtattgccgtgccagataatttatctgcaggtggttcgagtgcgtcttgggcattttcgatgccatgccatgatcgttggtgggagaccgaggccgcttatgagaagacgactccgttgttggggtgtgagattccattgtgggagttaggagacccctatgtgcaccctggagtggtgtaggatggtggaaagagaggaagagaataagattgggaggaaagagaggagaaatcgcggagagtgttcagataagagcgcgaagtatgaaactcgcgcggagatgaagcggacttgcgcggagggaaccggcaggtgactcctttttagaagacttaagctacatccatgaaggtggaggaatgagaagagaagtgtacgccttcagagggacggaacagcgcacggggagtggagaggaaaaacgtgatctggatttccggttggagtcccggggcttgaagagtcggttttatttattttatttttttggtttatcgtttgatcattttcctgtgattgacgaatcgtgttacgcagcaattccgaactcgcacaatgtgaggatctgccaccaaagtacctggtcttaagttgtagggagtcctcagcggagtcccgccggagggttccgctgacctgcgatacgctgcttcaactacacagttacaccttgcctatagtctcacatattttgtatgcagaatggcttctacatggcagtcgatcattctatacatgacgactgttatctctcgaaaaataagcctttcagccttgtggagtgttggtttcgctgatgcctgaacgggccagcgggctgaaacattttggtcccggggagctcggagggaatcacaagataatcatctggcctgggattcgatttggaaaaggaactcgaattggtacatcatattctgaatatccatagatatacatacacatgcaagtacgtggaattcaaggaatgtatggtcttcaacggtgaaatgtccagacagctgataagatacatgtaatctcgctgttaaatacctccgagcgggattcctcacagccgtcaagcgcaaaaatacagcggtaatcagtaattcccataccaaggcggactccttcctgcctgaggccgccgtccctaaaaatccctcatagacgcgcccaccttgcttgtaccttccgctctcccccagacaacagagaagataccgagatacccgtctgtgtccatcggatccaagcttttattccctcacctattatcttccttgctttttctaaatccctcaatttcacacgccatgtctgaacgaggctcgttccgaggcggtcgcggtcgtggaggccgtggcggccagggccagcagaaaagtggcggtggtggcggtgcacaggagaagcccaaaaaggaaaacatcttggatctcggcaagtacatggacaaggaggttcaggtgaagttcaatggtggtcgtgaaggtatgttggattatctcttctaatatttgcttattatctttctttttcttctgcttttggtcttgacttctcatcgcatccatctatgaaccatatatgctaactccaataacagtcaccggtactctcaagggttacgaccagttgatgaacctggtcctcgatgacgtaaaggagaccatgcgtggtgagttccaacttccttacttgaatctaatctattatctctgcttatactaacccccacagacgaggagggtaacactaccacccgctcaatgggtctgatcgtcgcccgtggcacgttgatcgtactgatctcccccgccgacggaagcgaggagatccccaaccctttcctgcaatcagaagagtaaaaaaaaaaaaaaaactctctttcacgtattatcttctttccgggtttcattctttccggatcgggacgtcatttcaggaaatggacatcctgcatctagttggagtttcaaaacattacacaccttaatgtcccaatggctttcggcgtgcgccggaacatacgctcatcagtagctacgaagggaacgaacgcaatatgatggtttcgctttttttcttttctgtcgacttggaatgtgcatgataggactgctactgtggtgcagttctgtctttcgtctctattttcttctcaagaggaagtgatgaatttgggatcggctcatgatacatagcaccacaaccaaactaggatataaccgaaaaaaatcaatatagtcaacacgagagctatccaagcgaactgaactccgtaggtatcatgtattaaaagctaacataatatattcacatactatcctgtacactcccccgatcgccgatctactggcccacttccccagatgtaggacccaccgtctctccaaactcagcggagtcatcggaagcatcactatggtcatcgggcaaagaaacccgccgcggctctgcatccttcaaccttcttacaccctctgcctcctcgacccagggcccgaccttctccgtgccgtcgatatactcggcagcaatgcgcagattcagacccgcgctaagggcacgctcgatgcgggtctcgcgattctgagacacaagcgtgcggaaaacgtgcacgaagaagccgccgagaatatcaacgctccagtcctccggaacaagctcaagcacttcacggacatcgaaccacgccgcgaagcgcgcgaggagatcgcttgtgcgctcgatacggtcggacacgtcctcaatgtggagaaactcgtcgagcaggtggcggaagagcgttgtctgtaaggtgtagtctgctagttctggtaggatgcctgttgaagaggaagagctgcgcggaccgccgaagacacagtagcggattgcggagtcgtagtcgcctagcccgtgtgtgaggagatggagggccgggctgtggtggccttgtaggccgtcgaggataatgcattccgagactagctcgttctggaatggctcgatgcgggtgaggacgttggggattgagtagctgattcctgttgggaggggttgcgaggtaaatcgagagccggagattccacccagcagctgaagtaaccggagtcgggactgccaccagggctctgtgggggtgttctcgattatgaagtttaagtatgtcggtttgggagcacgcagggctcgataggtggagtaggattcggccaaagaagcccgtgcttcgggggatgactcaagcacggagagtaccgtgtctaagtagtatgagatcaggtcgtcggcatattgcgtgtactatatcccggtcagtgagatgtgcatggactaggcaacatgacgtcttacattctttgcaaataccaggtgctctaggtagacctggaccgcgtttggagctcgctccttgagtaaagcaacaacatccgccggttcgagtctaacacggctggcgttgtctgcgaatatctggatgcccagattggggtttcgcccagccagccaagagccatactcttcaaccagctgcacgtcctttatcttgaccaagtacctgcgcatctgcgtctccacaccatccgcggagacctctccgccagcgtcagtctccccatcaacgattcgctgccaggttttgagcacgtttcgagccatctttcggctttgatacaaacggcttagcacatagagccgcttgtatgtttccaggagcatcactgctcggtcgaaattgcctttccaattgtcgaccagcttattcagctcagcgcgaattggcgacgctgcccgctgatctcgcgtcaggtaggcgtcttgttccaaggtcaggtgcaagagcgcagcatctgtgctatctaaaacatatgtctcatcggtgatactaccatatccccgcttctgctgccaggagagaaggaatcgtttcaccatattgagaacaggactgcgagaagcatccaatccagaggattcgatgcctatcttcccgacttgttcaagatattgttccgccatgcttgccagcccagcgtgtatccatataccctggggcccctgcaaaacctcgcatcgcaacagaggaataaatagcaatgccaaacgcggatcgaggttacctgccagcagcgctttctcggtgccatcgattgccgtggcatcacggtcgtctggctgcatggagaggaggtctccataaagcataaggctggccttttgtttcacatagctcaatccaataaattcggcctcggtctttggctcggtgttctggacggagagtagcagatccagaatggcatcccgacgcagcaccgtgtgctcgttctcttccgtttcctgggccctctgcagggtgtcctccagctggactatcaatggattatgcagtacgcgccatatttgagatccagaccacatgacaagactgctctggaccttgcctagtccacgtgcaaattttgcttcttcggcattgcgttgagcctcccagccttgggttgctgagccgtcgctcttcttgattccctccgagtcggccaattcttgcgaatcgaacagctctttctctttttgggagtgctcgatagatgcctcagttctcgaatctgctaccgacacatgcggtggcagcgtcgggtttttgaggcggaccatccgcaagagctgcccgatttcgttgagctcaagatggctagggctgagggtatgtcgaaggccgacttgggattgtgtctctccgggagaaggtatctctaaccagctcttggtccgctcaatctcccctgggtcgtcgtcccaacgttggatttcgagtcttgttcggaacttcccaccatcttcgtcttcgataacagcgagaacaaactcctctttggcatcttcactagtctgaaacatctcatcattttcgtttgtgtcaatcacaaccgactttggaaatctgtggaagttaattgtgccccggacaacttcaccgtccatgtcgacaaacatgccaacgcccggttctgtctcctcggttccggtcacaagtagaaactcagaaggtgtcggagataccacgtgaggctggagacgctttccttgttttgttggcggaggtagaggtggtaagggcttcaagctgtcgttggtgggagacttattgtctgactctgggtcactagggggcttaggggagctctttccatctcgctcctcagagcttgatcttctgggttccccggtagatgtgaaaggatccggtgtccctgatggtgatctatctagctgggccgcttgtgcctgcggtgagagcatgcccacaaaggtattcatactattgcttctgccatgccccgaggcatcacttggtggagaagcagggtaggatgaagaaggtgaacgtttcagcggagtgcgcggcgctgggttcatgtcttccacatgccctgactcaaaaacctcattcgaggaggatattgggaagagcgggatcttctgttgatgcgccacttcgagtaatgagtatgaatgtgtatccgcagcacatgcgatcgttcctcgtcgcgctgcagtcaagcaaccaggaaactcgatcttcttgatccgtcgcgcctcatccccaatctgaaccagcatgattctgttctgcacagcaatcatgatagtcggattttcgccttcctctgcatcccagttgagatccaacccaccgatccagcggcagtgattgacctttgtggctccaaaggccgggctgagctccggcagcatgtagaacgtaacggtgccattgcagagaacacatgccttgtttactgaggacaagagaacgatttgtcgaacaccttcctgatcagtacccgctgggggactctgggcgaataggatcggtaatcgggatgccaatataaaggtaggttcggcggtttcgtctggggatgagggcgggagacatacgaagtgcaagatctcggctgcagatgtgccaatgtataggttttcatctgtacaagattagtcagctctggggccatccatggatggagcaggcaccgaaacagatagagcttactccagtattcaacacaggtgatgtagacgttgtcgctatgctcagtcgctaacggcacatccccgaagagggaatgtaacaaatacggcacagccactggtggactggtcttgcgccttttgcgtggaccaattccatcgtctgaacccatcatgagactgtagttctgagcatctccccgcaagcttggatcgtgacaatgggagggcggtcagtagctggggccaaagctcaggggcaactaatcgtatttgtcaggcagaagataaagcgatcgacgcgtgtgaagatgcaatcctagctttgtacacattagtattgaagctgattctctaggacctaaaagcttattcttaggctttagtttggtgctctctgtcttactaattttatttacaatctgaagctttaaatgcgatgctcaagtaggacataaaggcggtcatttaggcggtcaccaatctataagcggtcgttgtctcctgccatacattatactgttggaaacgggtgcctcgggttaactgcggtcgccttgaaacaatacactcattatatagtctccatgcttgaggtccctgggtgtcctctcaccttttgtatcacctttgtcataaatctgtattcaacaacgccaaccacagatcgtacgttgtacatacaaccggaacaatatcggcccgttcgccgcgtgtcctgttcctcgcgataacatatctccatctctccccttggtggactgccatttgatgtggggtgacagtgcagacccctggggttaggactgacaatggattcattcgccatcacagagagtttggtccctcaggaccaacatgacacccaacctgaatcacccatgtccagcaaattaaccgaagagaccaacaagttccaacgcgccatttcagcctggagaggtaattatcttcttatatgttgctgagtctttactgacatatctagggattgatttggccaacactattgcgaaactcgataccaccgctgcggacctcgttgaacaacagcgcgatgcactcgtgcaaagaaaggacctggcacagaagacgaaagcctacaagaagctagacgatgaatctaagctctcggaatataaaacactactgaagtcctatcagtcctttatcgatctcttgaccaaccaaggcaagacgtcatcgtcctcattcttacaactatactcttccttatccgaagctccggacccctacccactcctagaagcttctgtcgactcccttgtcctgtccgaagatacagttcccaaactgacctcagaacgggaccaattgcagaagtcggtggatcgtctcaccagacaacaagaggagaccgagaaacgcctacaggaggaacgtgctgcgcggaagaaactagaggaaaaccaggaatcaagagctcaggaaatcgaagcatcgtgggaagctgttttgacagaaaagacaaataactgggcggcaaaggagaagactttagaagagaaagtggaaaaccaggatcgattgatcaaggagctcaaagcaagctatgaggtttcccagcgcctaggtgagggtgggaatcaaggtgatgatagtgagggttcgcggagtggcgctactgcagctgagctcgagctggtttctgccgatttagagaaaacgagcttgagattggctgacgtggaagcacgcaatgaacaaatgcggttggagctggctcacgctgtatcacatgcatctggtccgatttctgttgaggacgaccccgattatctacgactccagtcagagaactcttcattgcttcgcaaactagatgctgcacgatttgacaaagactcagaacgacacacctgggaagctaaactgcttcaatcggagcgggcagcttctaaggcagcagtggaaagggaagagttgcgtgtgcggttagcaaaggtagccgactacgatgagatccggcgtgagctagagatgatcagatcgattgagttcgcagctggcgatgatgatgagccgggagacggtgctggtggtggttctgcggttgacgccaatggtgagggggccaaatccaaagacaagaattctctggagcaactccttatggcccggaacaagaaattgacggatgatctcaccgtcctgcgaatgtcgcaccgcgatatccacgggcagctcgaaacactacggaccgagctttcgacttcgaaggcagagctggagaagtcacgcaccctggcaactactcttgagaatgaccttcttcgtgtgcaagatgaggctgcaaatgctttcccatcctcggcgatgtctgttgcaggaacttatacctcaagatatccatcttctgcccgtcggggcgcgtcatcgcccacctcatccatcatctctggctttgaccagagtgcagtgtctgcaaacaccatggaatctatccgtgcaggagaagccgttggtggcggctctggcctcctacccatgatccaggcccaacgcgaccgcttcaagaagaagaatgctgagctcgaagaagagctatcaaagctatatgccactgtcaagtccctccgacaggaagttgcatcactccaaaaggacaacctgagtctctacgaaaagactcgctatgtctcgacctacagtcgtggccagggtgcctccacatctgcatcgtcgtttgcaaatactcccagctcaacttctatctatacctctgcagatacgccttcgggtctgtcccttgaccgataccaaaacgcctacgaggctcgaatctcaccgtttgctgcgttccggggccgtgaatccacgcgcgcatacaaacgcatgagcctaccagagcgtatcgtcttctctcttactcgagtcattcttgccaatcggacaagtcggaacttgttcgctggttactgctttgcactccatcttctactttttactgtgctctatatgatgagcacgacggatatcgagaaacatagcgctatgggcgccgccggtagcgccgctgctgctgcatacggtagtagcagcgggggtggagtgggcacgggtaatggcgggagtcagctgaaaggtgatgactggcagcaggaaggtttcaactaatattccaaggtttttttctggtgtttacacagcgaagagctccggagttccttttttacttttctatttttactctttctcttcatgacgatcatacgtcctggtgtctgggattaagtgtttctctgcgctgtactattctgggatgtgggtcgagagcggcatcgtgtgtaaatttgatttctggcaaatatcatgtgtctgagaccaatatagatggccgtagatttcgaatgtttccaaggggtgtgatgagcttaggtgtgtttaggtgtgtccgaagtagatccaagccctaatcacatcccttttgaggctatgtaaggagacttgtttggccctacttggcctctcgggtcggattggaattttcctaaaccccctcatatctatgtactctttctccttggagactcggtagtgttgttcacgcaatactacgggtgcatgtaggctttgtagctgacatacgatgtttggacggcattatgcttgagatatcaaaacattcttaagccctcgtcaatcccaattctgggtaatcatgcatgtcagttaggtacaaagatacctgtcagttcggacttcactcccgacgtcaatgtgatgcattagtgtcggagaattatggcctagcagatatatatatctcaccggtggcttgcccaagtcaaataaacacaggcaaaaatgccgacaggtaataaaagcaagtgtcatcggtcacataaatagatgcaagctgcgatcattacaaagggtctgagcaacttcatgtaagatggcgttatttagccgccggtgcgctgtaacttggaaagggaaaaaacaagacgggagaacggaagccaaccccgccatgtcagccaccacaatccagcattggaagacggattgtgaacaaattggctcgaaattaggactatagcatggttgaaaacatgaaaaagctctatttgataagtgccagggacccatgtagctaatgcctgcaatattttccccgagttctgcacaaatcgtaggattatggcctagcatcgatgcctctgcacactagcctatactggcaatgatctcgcacatctaacccaacacacatggcactgttcttcagtcagacttattaatagccccggggaatttatagcgctcaccacattggctcggttcgagctcctacaatcgaaccgccaagggaaaccccgttgttttgcttagcgcattgctatcatgatttagtcaaagtcgcttgcagtcgacgacaaatcagaagccaaagaggctgggagggtcagcactgggcgcatccatctaccaatgagaggccgtggtcgagctttaatccctgctagtacctgcaggttgcatcgatcactctgttaatagcacacagcattgtttcgagtcggacctgtgttactatctttgttatatgcttgaattgaaggatagttgcaattaccaccgcgtctatatgtatagctgcccctcggcccggccaatttatcatgtcaacccttcccttgtcatttcttctccaacacgcttacctcccttccttcatacttcatacccgacttgtatcaaaggcttgctgggcaatctttgattaatctcaaaaaagtcatcgccattgaccgtatatttatctgcctagcctgaacacataacagcaatgcgctttgcttccctcatcatctgcctggcagcagtttcgcttgctgccccaacaagcttccttgacgatgcatacaactggactgaggaaatggcagaattctacggaaaagtgagccagtacatcaacaccgcaaaacataacatcagagcaccgggggcttgcgatgtctctaagattgccctgccttcctatgcttcgggaatggccagcccgtcagggctaaagccaagatacgttgcactcggtcgaggcacgcaggtatgacaagctcctgagatactttattgagttacatcgctcattatagaactagaactacacatgtgcggactctacttccaactccacacccgcggctgtaggagctgtcgcaagactgtacaatgccacatgtattgcagccaactaccccgatctcctggcaaagctccccaaccttgcctacacggtttccctaccgaccaacgaagatgcctcgttccctcccgccaacctcgacttgatgggtcaccacttcttcactgatgtaacccccgagttcaacttgaacaccactcccaaaaagcagaatgggattgtcatggcaaagaagggaggtgcattagatgcaccctcaggttcagtgtcagggcagtacggtgctgtgccttggctctatctcacttctaccgatggcacggtgggcaactacaagagtgtctatcgagtcaacactgccgctggatcgtcaccaacgacctgcaagggtatgccactcgcattccaaatgcaatatgctgcggtctactacttttttggagagtaattgattgttttttgttatgtttgtatatacagaaggggactttggtcggaggattcgatttttctatatgtgaggcgggcgctatcttactttgctactattatttagttcatgaccgattatgagctggtgccaaggaattaattgttattcttcatcgatcgtactccgtagtgttccatctcacccactgcagggttaattcgacaggagcacattgcagacagaacttatattttggttggtccaatcacttcgttcaaacctacatgcttgaaataccaccactgaataatcagcgataactttgtctattttcaatcgcagctttgcatttcagacaatacagggcttaacggatcacgtgacatacacatggaggaatgctctcacgtgacgctctcacacggaggacacgctaaactggaaacaacctagcgccgttctgattttctgaaagatcccaaaggcgcaaaaaaaaatctcgaccgcatcaacgagcagcatcggtatcgatccgtatccgacagatagtcagcggccaattctgtttgaattgcttgatccaactatctctgatacgttgccaatttttttctccctctttatcgactctcggaacttttattccaattttcaactacactcggttcaagcactcggaaacgacagcttaacctccctctcctctgacttcttttataaccgagtcttttctcaacacacataaaatgtcttctttcgctcctcgtggacgtggtggatttggtggtgatcgcggcggtggccgtggtggtcgaggtttgttcagtccgatccatttgagcagcaagcattcaggtccaaaatctcgctggtgattctaccgcaccgatggccatggtcctgtttcttgttgcgatactatagttcacattgctgacttgttgaaggtggcttcggcgaccgtggtggccgtggaggtggccgtggtggcttcggtgatcgtggcggccgtggaggtggccgtggtggattcggtgaccgtggcggccgtggaggtggtcgcggtgcccctcgtggtggccgtggtgctcctcgtggtggccgtggtgctccccgcggtggtggtggtgctcgtggtggtgccaaggttgtcattgtaagtgttggaaattctcatggacatgggtatcagtcactaacgtaatcttttctcttgcgaataggagcctcaccgtcacgccggtatcttcgtcgctcgcggtggtaaggaagacatgcttgtgacgaaaaaccttacgcctggaactgctgtctacggcgagaagcgcatttccgtcgagggccccgcaactgaggatggtactgtcactaagaacgagtaccgtgtctggaaccccttccgttctaaggtaaatactcctccttatcctgggctaaagatgcatggtatccttggcgatttcatcgaatttttctcggaattcttcaatatcgccccgatagccatggctgccttattgtttagtccttcttttctaacgtcttctcccttttctagttggctgctggtgtgttgggtggtcttgatgatatctacatgaagcccggctccaaggttctttacatcggtgctgcctccggtacctccgtttctcacgtcgctgatattgtcggccccactggtaacgtctacgccgtcgagttctcccaccgctctggccgtgatctgatcggcatggccactcaccgtaccaacgtcatccccattgttgaggatgcccgtcaccctctccgttaccgtatgctcgtccccatggtcgatgtcatctttgccgatgttgcccagcccgatcaggcccgtattgtcggattgaacgcccacatgttcctcaaggatggaggtggtgtcattgtctccgtcaaggccaactgtattgacagcacagccaagcccgaggttgtgttcgctaaggaggtccagaagatgcgcgaggagaagattaagcccaaggagcagctgaccctcgagcctttcgagcgtgaccactgtatcgtcgctggtatctacaagcgtaccgcataaaggtcttaatctctggtctctggttatgtccattcccttttgatgttccctcggcgtctcgtgttctgtgatgtatcgaatgttttccacctttcttgtgacaggtatttccgcctatgtacttttggctgcgtcttaaaatttagttttccttttcgatgaattttacacgctggaatgtgtcatactgagtgtcttgatctgaggtgatgagatggttagcgtatgatatccgtacctaggtagctgcaagtggccaatacaagcgatttgagtcttgctaacatttcgccggcaacattggagcattcttgtagatatagctgccagttgttctacaagtgtctgtcgaccgatatagagcgtatctggcaaagactcagagcaattccaacaaagaagcagcacttcggtaattgctactagcatcgtctaggaatgaaaaaggtaggtcatcttcccaatggtgcattctcggacttgccccgggcctcccggtaatcggattgatgaccgaggcttgcaccgagaaaatgactcggaattgatgcgcgagaacttggactaatcgatcatattggggggatatgataatacgattggctgatggggaattactatgaccgaacgagcgtgggggagagacaagttccgcttcaaccccgcaaggtgtgttactatataatggcaacgcatgtaatttccgttctacatagttgaatatactgctattcattgcactgccctcttgctaatagccagacttaccggcatcgattgacccaattacccaaactaccttgtcttatacatatccatgatgtcgattctcatcaccggtgcggggggctatgtcggccaggaactagcggcttccctgcttgcaagcacaccagccacgacaaccgtgacaatcaccgatatcgttgagcccgagatcccagagtcggctgcacagtatgcaaaccgcctcaggtgcgtcaaggcggatctcacctccaccaaagaggtcgacgagctgatcagcgcatccaacccctacgagacagtctatatcctccatggtatcatgtctggcggctccgaggccaatttcgagctgggcatccgtgtcaacctcgacgcaacacggtacattctggaccggctacgcaagaccgtgcccggaacgaaggtggtcttcacttcatcactggcagtctacggccttgcaccaccaggattcgtcattgatgagacaaatttccctcctgtgccatcctcctcatatggatcgcagaaactcattattgagacactgctgaacgactactcgcgacgcggattcctggatggccggtgcgtgcgtctgcccacggtgaccgtgagagctggcaagcccactcaggctgccagtagcttcgccagtgatatcatccgcgagcccttccacggtaataaggctattttgccggtggccaaggagacggagatgtggatttgctcgccgcacactgtaatcaagaacttgattcatgcccgtgaggtacccaaggaggcatttggagattcaagagctgttaatcttcctgggctgaaggttagtatgcagcagatgttggatgccttgttggaagttggtggcaaggagcgtcgggatctcgtggaggagaagtatgacgctgccaccgacaagcttgtgcaaacatggactccacgatttgatactgctcgtgctttcgagttgggttttgcagcggatatttcgatggaggagaacatcagacagtttgcgagccggtttgtatgagctggaggcatgtagccaatcaatagacgcgaaattggatgaccgaaattgaaagatcggaaaaccaggcatatccggatacgttaggatcaggcaagccccatttgaacattataaagaacaaaaaagacaatatacaggccaatttagaccgtattctagcccacattatgaattaatgcagtgtaaggaagtattcgggatgtcaagggcggtttggaaaagcgggttatgtaattggctgagctgggcgaacaatttcagacttcggaacctcaacctcagggcgtctccatcagctcttttctccatctcttctcccttccccctccctccacccatacaagtcgctcccaatggcttctcggcgccttgctttcaacctaaaccaggctctccgcactcgtgcggccctgaagtccatccagcccgtgaagcgtggctttgcgtccccggttgcgttgccgtccaccacccagtccaccaccctctccaacggattcacggtacgaacatgcaattcatctcaatgatatcgcaatttagctaataatcttctagatcgccactgatcactcgccatgggcccaaacctcgacggtcggcgtgtggatcgatgccggtagccgggcagagactgacaagaccaacggaaccgcacacttccttgagcaccttgccttcaaggtccgaccctacaaaccccaaactacgaagcgcttttatctgataatatgactagggcaccaacaagcgctcccagcaccaattggagcttgagattgagaacatgggtgctcacctcaacgcctacacttcggtacgagccgggaaaccacccaccaacgtctaccgtacctaatactgatcgcgaatactatagagggaaaacactgtctactacgccaaggcctttaacaacgatgtccccaaggccgtcgacatcctcgccgatattcttcagaactccaagctcgaggctagtgccattgagcgtgagcgtgatgtgatcctgcgcgagcaggaggaggtcgacaaacagctcgaggaggttgtcttcgaccaccttcacgccactgcttaccaggcccagcccctcggccgcaccatcctcggccccaaggagaacatccagaccatcacccgggacaacctgaccgactacatcaagaccaactacactgctgaccgcatggtcctggtcggtgctggtggtatcccccacgagcagctcgtgagactcgctgaggaacacttcggtggcctccccagcaagccccctacctccgctgccctggccctcactgccgagcagaagcgcattcccgagttcatcggttccgaggtccgtctccgtgacgacaccatcccctccgcccacatcgctctcgccgtcgagggtgttagctggaaggatgatgactacttcaccgctctggtcacccaggccatcgtcggtaactgggaccgtgccatgggccagtcgcccttcctcggcagcaagctcagctcccacgtcagccaccacaacctggctaacagcttcatgagcttctccaccagctacagcgacaccgggtaagttttgtttcctgttgatcatctatgtatattcttgatcaaaaacatgctgacttagtattagtctctggggtatctaccttgtcagcgagaacctcactcagctcgatgacctgatccacttcactctccgcgagtggtctcgtctgtgcaacaacgtcagctccgctgaggttgagcgtgccaaggcccagcttaaggcttccatcctcctgtctctcgatggcactaccgccgtcgctgaggatatcggccgccagattatcaccactggccgccgtctgagcgccgaggacattgagcgtactgtcagccagatcaccgagaaggacgtcatggacttcgctacccgtaagttgtgggatcaggatctcgccatgagcgctgtcggcagcatcgagggtatcctcgactaccagcgtatccgcgcagacatgtcccgcatgatctcgtaaagttgttctagagtatgatcgcgtgtgaagatagctgctgaatactccaggaaaactgggtttttggcggctttgatttgaatgtactatcaatcattgccttgggctgttagatcccaaattcgtgtgtgaaatagcaattaatggtttgccatagtagactatatagtttgctgcttttgcagcaagcataccaattatctcctttgtttgttctatttcttccagtgcactgtgaggttttttttctttctctgcgtagtatcaccaccatcgtagttgcctctatcgccgagtctctggaaatggtcgtcgttgcacccaagtcctcgtgtttcctacatctcacagttctttgcatttgagtttacccttcttcgcttactctatgccagcctggtcagaacttcaaaccacaagtacctatctggatactttactttgacgattggcatctctgctgactgggttcaattcttgagctcttgtaagttttctcgctatcttcacttggtcatcatttctcaccactgctgtttccttctaaccgacatcgatattttagtgactgaacctctctcatcatggcgcgattctctacccttccagccgagttgcgcgagctgatttgggagtttgcccttccagcgcgagtcgttgagattggagaaccatgcgacccagatatcttaccagaggaagacctcagacgagcatgggtccttaacagaaagtatccaaccattgctcatgtctgtttggaatcacgccgaatcgctctggccaaattcaagctccccaaaggtgttgctcttgcgcaggattgcatgacagatgatcgatggtggtggaagtcgaccgacattattcacttcaatgctccagagattgtcgcaccaacgcaaagatgcatactagaagacaacctattggacttgataagtgttcctattctatgcaaaaaggtctctatcagtgcagacatcgttcacccttttttgcgtttccgtactaggtccgagatcccacactcgatagtatgggaagtgctttcctcaatggagacatgcataatagccctacacacagtctgtatccgagccaccaacgaacaagctcaggagctaggcctctttggcaacggagacgagccagcacagttgattgacccgtttgacaaggcagctatcaggcgattcagacagctctggatggacacaaaacaggaggtctcttcagtcaagttttttgatacaatcgacaccggaagattcacttttcgagtcgaaaggtggctcgcagagatgtcagcggagtacatcgacttcaaatcgaccgatccaccgttcccaaccctaggaccgcgggctataagtgcagcacttcgtcgattcccagctcaaagacacaattccgacgcgaaacaatatcttgtcggatttcccaatctgcatctgaggatcatgtttcgactctgcccacctgcagtggtcgatccggtgattacataaccatcccgcatttgatcgggagattttttgaaggcgattttgtttgaagttcactttcctataactcttaccacatcataacaatgggaaaacgtggcggcaaaaaggtaatcttatctttcagacgttttatatgagacgtttgttgtactgactgtgtctcctttcttacagggtggtagaggccgcggcggtggcggcggcgcaggccgtacgcgcgctcaatggcaagatattaccagacagaacgagaggttcgaacgctactacaatgaacccgagttcattccggaggaggaaaaggaggccttctgggctaccatgcgcaaggatcttcccaacagcttccgtttcactggttctcgagggtaagtcaccactaggcttttttttgcgacgcgccccgggaggtttcaagtaatattgactgttgtttactttcattagacacgcgctggctgtgcagcagagtcttaaggaccgttacattcctgaaatcacttctatcaaatacgaggacgaattcgtcgagcccccgcgcccagtttcgtggtacccagatcagctcgcttggtccatgaccactcctaagaatgtcatccgccgattcgcaccttttgcttcgttccagaagttccttgtcgccgagaccgacgtcggaaatatcagtcgccaggaggttgttagcatgattcctcctctcctcatcgacgctagacctggaatgactgtattggatatgtgcgctgcgccgggcagcaagtctgcgcagctcatggagctgcttcatgcaggtgaggaagatgcgattgcgcaagttactgaacagatcaagaacggcactgctggacctgaacccatcggccccgaaggattgaacgacgatggccgaagcaccggtcttctgattgccaacgacagcgactacaagcgcgctcacatgcttatccaccagatgaagcgcctgagctcgcccaatctaatagtaaccaaccacgatgccacactgttcccatccatcaagctgcctcctctgcccactgccgatggcagcaaaccccaaaacagatatttgaagtttgaccgcatcctggcagatgttccttgctctggcgatggtaccgcacgcaagaacgtcggtgtctggaaggactggacccctggcaatgctctgggactttacagcacgcaatctcgaatcctggttcgcgccctgcaaatgctgaaggtcggtggacgggtcgtctactcaacctgcagtctgaaccccgtggaaaacgaggctgtcattgctactgcaattgaacgctgcggtggcgctgccaacgttaagatcattgattgcagccaggagctgcccggcctcaagagagcttcaggtctgcgaaactggaaagtgatggaccgagagggccgcatgtggaacaactggcaggagatcgaggagcaccgagaccaggagggcatcaatggtcttgccagacttgcagagggcatgttcgccccaacaggcgaagctgccaacctgccgcttgaccgatgcatgcgtgtctacccccaccagcaggatactggaggtttcttcatcacagttcttgagaagacctccgaaatcaaggccaagccggagagcaccaacgttatccccaagggttctattgcagctctcgccgcggaacttgattctaggaagaacgaggtaaatggacagcctctggagaaactcgagtcgctggatgaattagtcactcccgatgaagaggtagaggaagaactcgcaaagaatacctctgttgctgaggccgttcaccaactcccgtactctgctaccctcgatgcatccacccctgcttctcccgtgaaacgggctgcaggtgaccttgaagcagaaattcctgccaagaggagtagactagacgatggcacggaagtcatgctcggtgaccggcccgtccacgccccagcgcatggagtgagaactggccttgacactcctgataacagcacaccttctacctccgcgcctaccgcacagtctttcaagaagaagggtccccgtcaagaggagccgttcaagtaccttgatcctaatcacgaggagcttgttcctatctatgaattctacaagttgtcggatcgattcccccgtgaccgtttcatggtccgcaatgccgaaggtctcccaacccgcacagtttactacaccagtgccttgggacgggacattctcacctgcaatgaaggccatggcatgaagttcgtccactgcggtgtgaagatgttcgttaagcaggatgcacagcgtgagaacgtctgcagatggcgtgttcagaccgatggcctgaaaatcatcgagccgtggctgggccctgaacggtccgtcgttctgaccaaaagggagactctgcgtcgtctcctcgtggagatgttccccaaggtcaccgacgatggctggaagtctctgggcgagattggcgagcaagtgaaggatatccccatggggtgcagcattcttcgcgtccaagcgaacgtcggagaggatggtcttccgtgagttttcccctttcacattcctttgagtgatatttgcgtcttactaacatgaactatagtgaggccatggttctgccattgtggcgatccctctattctttgaaccttatgcttcccaaggaagagcgccgcgccatgttgctgcgtatcttcaatgactccacccctctgatcaacaccacacagaggcagggtgtcaagaccgagccgaccgagccgactgctgaggccgaggacattgcactgaaggaagagaatctcgaggttggacaggaagcgcaggacgaagtggatgatcgtgagacatacaccaaggatggcgatgaggaggatcgcttcaacaccaccgtgtaaatggttttatttttttcctcctaatgcggagatctctttgccgtatcaaaaagccaatatcatgaattccccttaggttcgttcacccttggtagtttcctaagtgagctgcatcattaggaatctcatacaacgtgcaccggctaaattcaggcctccacaacttccccgcaggaaaattgcttacttttaattccgagttgattaaaatctcctgccatttgatatgtggaaaaaatagacccccgcaatgcaacacggagcatccggggacccctcaatttgtctggggtaatgacgaaaggtctggcttgggaaaggggtcattgctatagtagtacagcaatcgcatattcccttgattcgtgtcagacatgtctcgagcctccgtgctatatgaatggcgcaacccctgcattgcaaggaaattggacctgagtccaagtgcttcctctcctctctgtccctagcacaccgcttcacccttgtgtgaattgtcacgaccgccatgaagctctcgtcttcttgggccattgcctgtctggcagcccaggccgctggtgctgctattacccattcgctaaatggctttagtatcaccgagcacccggatcccgttaagcgggatttgctccagaaatacgtatgttgggttggtccttggattaggatgattgtgttgacaagcaaattgtataggtcacttgggatgacaagtctctctttgtcaatggcgagagaatcatgctatttagtggtgaaatccacccatatcggtaagctggaaggcatcaatgagccctttcaagaaagaatcatgctaaccaagattcctgcagtctgcctgttccatctttgtggattgatgtgttccaaaaggttaaggctctaggatttaactgcgtttcattctatatcgactgggctctgctggaaggtaagccgggtcagtatactgctgatggaatatttgctctggagccattcttcgacgccgccaaagaggctggcatctatcttctggcccgtcctggtccctacatcaatgctgaagcatcgggtggtggtttcccgggatggcttcagcgcgtgaatggaactctacgaactagtgatgaggcctacctggaggcaacggacaagtatgtgatcctttcgaaacgtaagacttaaagcacggtgaatactgacatagataattagctacattgccaatgttgccgcaaccatcgcgaagggtcaaatcaccaatggaggacctgtcattctttaccaacccgagaacgagtacagtggcgcttgctgtggatacgacgggtttccagacggtgcctatatgcaatacgtggaggatcaggctcggaatgctggaattgtcgtgcctcttattagcaacgatgcctcagctggtggccacaatgcccctggaactggcgaaggggctgtggatatctatggccacgacagctaccctctcggctttgactgcgcaaacccttctacttggccagcgggtaatctgcccacttatttctataccacacacatggaccagagcccttcgaccccattctctctagttgaggtaagatatatggatatctcctgtgtggactatcaatctaactggagtttagtttcaaggtggtgcctttgatccctggggaggtgttgggttcacgaaatgtgctgctctcctgaaccatgagttcgagagagtgttttataagaacaatctcagcttccgagttgcattcctcaacctatacatggtatgttccggctctcatatcataatcaccattctaatctctcaccggtagatctttggtggtacgaattggggaaatctgggccaccccggtggatacacatcctatgattatggttctccgattactgaatctcgaaacatcacccgggagaagtacagcgagctgaagctgattggtaactttgtcaaagtctcaccggcctaccttctctcaacaccaggagacttgaccacttccaagtacacaacctcgtctgatatagccgtgactcctctgctaggagacgacaacacggcttcgtccttcttcatcgttcgacactccgactactcgagccaagggtccgtcgactataagctcaaggttcctactagtgccggtgaagtgaccattccccagcttggcgggagcctcactctcagcggccgtgattccaagattcatgtcgttaactatgatgtggcgggcaccaacatcctctactcctctgctgaggtgtttacctggacggggtctggtaagtccaagattcttgtcttgtacagcggccccggcgagcatcacgagctggctgtctcttcccagtcgaaggcttcggttattgaaggctcgtcgtcgaacatcaccattaagcaggtgggtaaggcggttgttatcggttgggacgtctcagtcactcgccgtattgtgcaagtgggtgatctgaagataattcttctgggtaagtgctttctccgataccgctctgcttcatcgcaactgactaaactactagatcggaactctgcctacaactactgggtccctcagctcccaaccaagggaacacgccctggttatagttcccaagaggcagccgcctcgtctctcatcgtcaaggctggttacctcgtgcggactgcttatctgcagggcaatgaccttcatctcactgctgatttcaacgccacgaccccgattgaggtaattggcgctccgaccaatgccaagaacctgattatcaacgggaagaaagcgcaggtcaagatcgacaagaacggaatctggtccagcagcgtcgtctataccgcaccgaagatcgagcttcctattctgaagaggctaaagtggaagtctattgatactctacccgagattcaagactcttacgatgattccacatgggttccagcaaacaaacccaccaaaaatagcgtccatgaactcaagactcctatctcgctactctcctctgactacggattccacaccggaaccctcctcttccggggccacttcgtcgcaaccggtaacgagaaaactttcttcgtgcagactcaagggggtagcgcattcggcagctcagtatggttgaacgagaaccacctaggatcatggggtggaatatccattgacagcgaccacaacagaacctacacactaccaactctaaagaagggcaagtcgtacgtgttcaccgtagtcgtggacaacatgggcctagacgaaaattggatcatcggcgaagaggaaatgaagaaccctcgcggtatcctgaactacgacctgtccggtcgctccgctagtgacatcagctggaagctgaccggaaacctgggtggcgaggactacctggacaaagtacgcggcccactcaacgagggaggcctatacgccgagcgccagggattccaccagacccagccgccgacccagagctggatatccgacagccccttcgacggcctgtctgcccctggaatcaagttttacagtgcaaacttcgatttgaacatcgagaagggctgggatgttcctctgtactttaacttcgggaacaccacctcctcgcccgcggcttaccgtgtccagctctatgtcaacgggtaccagtacgccaagtatgtgaacaatatcggtcctcagacgagcttccctgttcccgagggtattctcaactaccagggtaccaactatttggctttgagtctgtgggtgcttgagtcggatggtgctaagttggagagtctggacttgattcatactactcctgtgctgacggcgctgaaggttgagtcggtggatcagcctaagtataagaagcgtcaagcggcttattaggtatctaatgccaagtaagtaaataatgcagagtatacaatacaaagagtatgagccaaaaacaaaaagaaaccgcaatattattgttcgaggtcacgtgacttttatgtacagtacgctcccaacgatcattagtcccagctgtagatagtttctcttgtcctcttcacgcaatctgatattttccagagcatttacattcttcatgtagctctctcgtctctatatccgacatttatctacaatataatgaatagatcagactatcatccaaaatatctgaagtatcaaaagtactccgtagggcttccagggtcatctccacttctccgcagatcccagccaccccagcccagcctctgcccagcctccctcttctacttttggtgtgacatttttgtgcttttctaacatccttcaacattatacggagtattctcaataaaacccactcctctgacaccgcatatgccatcaaactccacaagcgcgcattagctcacaagctgacctcaaatcacccactcgctcgaatcaagatacccaagccctcgtgcctctcgaaatctacgcactctcacatttccaaaattaaagaccaaacgaccaggcatcatgtcgtccctccctctcgacaccttcgacctagacccgacaaaacccaacctcaacgcaagggacctgaacgccaaccttctccacaccgacacctccctccaaaaacgctacacaacaatctcgatcccatcaacatacggccgactacaaacaagcccggccgccggcacagtagtgggaatcatactaggaagcgtagcaggcttcgtactgctaatgtacgtactcttcctcgcggtgaacccggggggcattgcacggggcggcgtagccgcgccaacctcatcctcgatatcgatgtcgatgtcgatggacgaagaagaggtcgtggaggtgcgcaagcggcgcggctcatccgctggacggcgccgacgcgacatcatcgaggtcgaggaaagagagggcttccgcgatagttatcggcgtcgtccgacgtcgagacatgatcgtgtcgttgtagaggagtctctggctacttctactactggggaggatgttattgaggttgaggaagaggagtcttcggtgccttctgatatttcgccgcgtccgccgcggagatctaggaggagtgggattaggcatgttgatcctatggcttatggtgggggtagtgattatagtaaccatcggtgattcggggtgtgctctggaggtttgggatgcgatataccatttttgcttatattctatgttttatgtcttatgattgattcttcgaatgagttttagggtctccaaattatggctaacgcatgatgtcttcgagacgagccttggtgaaagacagaagatgacccacaatgatttagcggcccctgcagtatataaagaatgaatggcgttgtctatcaaattatattgctaataggataacaggatctacttgctgtccgaagtatcagtggccgtccacttgtacttggcccccgggtgatcgctgctcagcctgccatccgagaaatgaggtccaagataattctctcgtgttgttcgtccttcggccgcgactggatcccagaagacgcctcgcgatttgagctcggggatcagatacttgactacgtcctctagatctcccggcccgactgcatatgatatattaaagccgtcaacatcagtctcggaaatccacctctcgagtatatcagcaactgttttagcagagccgatagcacgggggtgtggtccaccaagtgcaagctcctgcgcaactcggtgctttgtccatttaatgccatcgctgccggggatcgtagccctccaactagagacgatactttgaatggccccgggtccactgaactcgaagttatcatcatctgcgtactttcccagatctgcgcctgtccagcctccaaatagtgcgagcgatccatccaggtcggcataagacaaatattcatcatacttctgttgggcacgctcatcggtttcgtcgacaatgataagaatgcctacgatcagcttcagcccgttcaaatcccggccctgttccaatgcgctccgtcgaacatcttggacattctttcggacagaatctatatgcattccaggaagaaacatagtttctgcgtgtttggtcgcaaatgccatacccgctttgctcgcccctgcctggaaaatgaagggagtccgctgcctggagggctcgacaagatgcggaccagcaaccttgaagtgtttcctatagctgatatcaataccgcataggaattcagttgaatttaagggactcacccttcgtggttgatacgccgaacccggtcagggtgcgtatatgtcttcaagtcgcggtcgagaataacggcgtcgtcccgccaagacccttcaaggagcttgtagacaacctcgagaaactcgtctgcgatctggtatcgctcatcatggctgatttgctgttccatacccaggttttttgctgcactctcgagatagcttgtaacaacattccacgctacacggccgttggtcaggtggtccagggttgagtatcgccgggcaagcaagaacggcgattcataggtagtagatgctgtgatgccaaacgagagcgacttggtgacagccgccatagcagcaatgggggcgctaggttgcgataagtgaattggttcatagaagtagcaaaaagttttaggaacctacgatgggtcagagattggaaattgggcagcacctggaagcacctctcggatgtttcccggaccattatagacatcgtaaatgcccagcatatctgcgaggaaaagcccatggaaattgccgtcgaggattttcgccaactcgatccagtacgcgatttccttgtaccggtgagtttggtttttcgggtgcctccatagccctatattgaaagtgttggccatttgaagagttgggctagtatagtacttttaattacctggagcgacatgagtcgggctgctcatggaaaaggcgttgaggatccatttcttgggttctgaggccatcttcggcgtggaattggatgaattgatgcaggagctgttagtacgcactgtcgaacgccctgaacatttaactttattggcccttgctgtgttaaataggtccttatcctgatagaaatggctgctgtgacgtgattcagccaagttatgacactactatgggggcattagggcttgacattgcggaatggcacatactatctaattaatgttagattcgtttctcaaagaggatttgacagactaaatccatggatagataccagatctgattgctcatgtacgggtatctggcacaagttgctgtgacgtgatttggctaagttatggctctacgatggggaaatcagggtctgatgttgcgagatttcaccggcacgcggtgtacaccagcaagctgtgcactcaaaatacatagtagccgtcctactgcctcaataatacctttcctagaaaacataagaattaggtatcttttatatagcacgctcatataaaaggtacatgcacgtagacctcattctctcaatcctccgactagtcagaggaagaacacggatattaaaataatgaaggctggtctaattaatttgctagaaaatattaatatatcccacgtggagacttgaagaccatatttggaaacactatataagagatgtatgtacctagagatagttacttaatgcactgatactgaacaaaatagacttcttttacactgtacataccaatagactttccctaagtatgcccaggaccgagaagtccctataatgcataatgtctgtatacccgtatggccaagccttatggggatgccatgtggaaatttctgctttgtgggacccctaaactgtacctgggaaagatatggggacgacggtagggcggctaaatgctacatccatacctcaacgaccatgttttacctctcgaggtccttatttgtcgatggtcgtcgataaggtttatttgcactatatatttcaatcttgaagaaagaagaagactatttcatcaatctaaggattaccgacacttacattattactaaaagctagaaatgtacatagcgcaatcgcaaagccatatatgttttcaaaaactcactggagaggcgagatatcacttataagtataatgctataaggagaattctatatgcaccaccgtcactaagatataaagatatcatttatcgcatttactatgtgcatcggactgcagctcgcttatgtgcgcagatcgacgtcaaagactggatttgattgcttgtgcatctggcgcaagattggtcgttgtgacgtgatccagccaaggtatggcactatgataagggaattaggcgttggcattatggattggcacatacctaactagggcttttggagtcgattccccaaaagattcgctgtactaaatactggatctgattcctcatgtaggattggtagatttgatactccactatgactcttgtgccttcaggtatgagctcttagagactatatatgacgaaatcgcgcggaatttcgtatcggagatagctttcagcacattggaaccactcagaattctcaaatcattgatactaagcggaacgatcaaccgagtgaggaaagcgtctaaccgatggaagaggccgaggctagagctttgcgccatagatctagtatgaaaggttttcaggtgctggcggggacataaagcaggtaaaagtctcggtagctgcacgtctaggaaagtgcaattcttcccgtgcatgatttttcgcctgtcagatttgacaccatgagtgagaccgcaagtccagtgccgcccctatcccagggagtcgggtatggagttgtcattggattgggagtcgctttcgctataggtaattcgctcagccctacaagcagcctgtgaattgccagtaacattgttcccgccaggcatggtattcaccacaagagcattgaagaaagtgttcggtgaagacagtaacacaacagagacgtaaggaaccaggcacctagttgtgaaatccagctaactccagtagcttcatggttgcaaaccgaagcgtcggaacaggattgactgcgtccgcggttatctcgtcctggaccttcacttccgctcttctaggcgcaccatacctcacctactggcacggaattgctctgccaatctggtgggccaacggacagagtgttatgatctgctgctttgcctacatggcaatccaggccaagctcaaggcgccaaatgcgcacaccctcctcgagctcatacgcgtacgctatggtcgtgctgcacatatcatatggatcataatggctcttctcaacaacatcttcaatttcacgtccatgctggtaggagcatcaactgcagtttccgccctgactggcatgaacgtatacgcctgcacatacctgttgccgctaggtgtcgtcgtgtatacatactggggtggactgagggctacatttttgacagactatatccacacattcatcatcatgattatcctggtgtggttcaccctcaaagttcttaccgtcgctgaaatcggttcactcactgcattctacgatctggtcaagtctcttccgcaggaagggacagtcgccggcaaccatgcgggatcatatctatcaatgaacagcaacgagtctttgttcttcggcattatccatatcgtcaccaacttcggaattgtattcatggatacgggcttctggcagaagggattctctgcagatattgcagccgcagttcccggatatatcatcggtggaaatgcctacttcgcgatcccgttcacttttggcacggttgttggtcttggtatgtgtcctcataattaacccgtgtcaatatctaacctccctttaggagccctcgtcttggaacagacccccatatggccgacctaccctcgcagaatgacccaggctgaggtctctggggggttggtactgccctatacggcgcaggcagttgctggaaagggaggtgccgcggcaattctgttgattctgtttatggcgtgcaccagtgtcgcatccgctcagctcattgccgtcagctcaattgtctcatttgacatttacgggtcgtacttcaataaaaaccccacggaccagcagttgatccgatggtcgcatgtgggcgtcgtcggatgcgcactgttcatttcgacctttgctaccgtgctccataagggtggagtcgacctcaactggactatatatatgattggcatcgttatttggtatttctcaattaccccaagagaactatattctcactaacagaccttatagccccggaacctttccaacatgctttgcgcttctctggaagaaacaatcccgcgtcgccgccattgtggcgcccatcgtgggtatggcttctggatttgccatctggttcgcgactgcctataagctgtatggggagatcagtatcattacgacgggcgagactctgccttgcatgtatgcatgtctcacgtcgatgtttgtcccgcttccagtatcagtggtattgtcttacctgcggccctcagactttgactgggacgagttcctcaaaatcgaaagaatcagcgataaaagtgattcacagccgcaatttgaccgtgagagttatttcagtccggaacgagtgaagtatatgaagcgcatgtcaaaaattgccgccatctgggccgtggcaacattcatgggccagatcgttctctggcctctgcccatgtacggcgcaaagacagtgatgtccaaggggctgtttgtggcctggttggttgtgggcctgatctggctgttcatcacgctgcttgttgccaacttttatcctcttgtcgacggtggattgcagcagatctggcaggtcatcgctgtagttagaaagaccactaaagatgactcgtccgaggtcattgaggtggatgtcatcccggagacgaagtcgtaactcacatagaatacgggctggaactggttgggccctaatcctcatcattagcacagatcactcgatttatatctacgacatggtcataagcaacgaaattaactgctaccaactggcaaatgttaaacaaaatttattacaggaatcggaagcttctattaaaatataacaaacgctttagctatgttagtaaatacatctcttaccggacaataggctagatatataatgtatctggtaaagtacacttcgacctgtattgctcaatactattgtaaaaagaaaaaaaatgccaacgatgtaactagttgttagttaactagagcctatgctatgacaaactcaagttggtcgatccactccttgaaggaaattgtgccgtgtctttcgttgtaacacctggaagaataaagaagacgaattttttgtcgatcgtggaaagggtcgacgaccgttatttttgctcgttggtaagccatggctctgatgttcatgttttgtaacctagagtgatcacgtagatatgcaaccacctctcgacagatccgcagactttcgtctttatgctctctttctagaggtttcgagatcctgaaatcacttgtccgggtgaggctgtcgagagtcaaatgtttcagggtgtgtagggctgtttgtagcatatgcctgaaggatacagtggttatgacttagctcagtgagaggaccgatagacgagaaaacttgaactgttgtgagatccagtcgaggtgtgcgtccgtcaggtcaaggccggctttctgtcggcagaacaaagagggatttatacctgcgagatgcatggtgagatccagactctctaagctcggggctgcctgaacaaagagcggcagcagtctcttcttctctctttcggggagatttttcctttcttgccagaccactgattcctgtagcaggaacgccacttcttctttgtcttcgcgtaagtgttgccgctcactatcttgggtatgggctgaggaaatgcgaacagacaagtgctgcagccgttgaagaattggcgtcaaggcttcttcttccgctggtgtgaggtctagttcatcatccaccatcatcccaccagaagtttcaagcctttcgatccgagtgtgggttgtaccgagggtggctaacagtgtggaaaaaacataggactgaaaaagactcccccgaaaggaactactacgagcacacttgtcagcaccccgggttagggagctaggataaaccagattgaagccaagttgtgtccgcaaacttcctatccctctcatgatcctgggaaatctcttagtttcgtcctcctgatgaccgtgatagtttctcagtcctgccatacgcagattggaaaaagaaggcaggcagctctctagtgcatctcgaaggggcgtttttgtggtgcttccctctagagatgacaaaagaatgttgaagtggtcgactactgcatccttgtagatgagataacgactttctaacggtacgtcacacattaaggcaagcagattattctaatattgttggccgccttaccggctgccttgcaggaagaaggaggggggaatcgtgaaggaaggaggagagttggagagaagtcgtagccgttgtccctgaagttccagagtttcctacgattgaatgagtcgcttaatatcctcaagtgcccacgtgtagtccgcacaaaaaatggtcggtacaatccacattgtctagcctcaagaatcagtttatattcgacgcattgcatggcaagaggtatgaatacacataccgtaacatatctgctgaagatttcgtggccagccacgtaccttaacgctcgtagaccatcgcttgtaagtgtaatgtagatttaaccaaagatcaaattagcaaggtagtggtaggttcccagtgcaaatgcactgcaacccagtcgtagtgcacaaacgtccttgatcttcagttttcgacatatttaggcccataactctggaggtagagaattcatagaaatttccatcatttggggaatctgacgttgaagataaaggcaaaaaaaagaatagtactgagaagttgggaaactactggtatgcgttttgggcgcctggcaggattataacgaaaaacgaatacctgtttctacgaacaggtaccggcgcaccaattaatccgccatactaataacgaatttttctcgttatgaactttgttgatcattcatcccatacaaaattcgttataactgttacgatcctatatatagtgagtgtcctgtgtcctagtgtatagcggccgacagtcggatgcctagttttaatggttttatagcctaatgaggactagctcttactagttttagactggcaggaaattaaaatgcctgaattactatgacagatctcctagtaagcagagtactaaaggccttccgatagctacagtacagtactacttcgtagactggcaaatgatttagccaaactgatctatatggcgttgtggtctgtgagtctgaatctttcctcaatgccggttatgccgtcaccgagtgtgccggttgaccatagcaaaaactaagcatctgttctattttacgtctgacacataatcccatttgcataaaggtgttggtaggactgtgagagtaccctgcagagaaacatgcatataagactttggttccaccttgtttaggtatttcaagactgcaagaagcgacatatgactcttacacggacaattcccttgtcgtcagtgctaatttgtcaaaaaatgccctccatcatgataagccatcttcatcttccgcaaacaaatttctaaattgttctaatctccaaaatggaaactcgccttccaaggctgtgcagatatcccattctaaagattgaatagtactgatcactcaacagcatcccgattgaagatacaacatgataaatcttcggctagtaagccatctgttctccaaataacctagctcttcttaaccaaataaagatgccatgcggccttccaggagacgtaaagctcgccatcaaagccgttcatcaaacatacaaatccggcatatggtcgcgtgcgagtcgtatctacccgatctataaactttcttttacggttatcttcgaaatttccttatatatagcgactgaaaatgaaaatgaagaattaggtagaacatcataaaccagctcgagggaaaagtaaacaaaaagtagtgtaaaaaatcattgtagtacaattgaggcccaaaccccaggaccaggacccaagaacgccatgtcctgttgtgcgccagcgataagtaataagagtcaaggatatatacaagggagcaaaaaaacgatcacaccctgagaccaatttccaacccaggattcacaaagcaccagttcccgagtcaaatgccaatcccaggaaactccaatatctatctctcgatggttctctcaggagtatcgtgtttgcgcgactggaaaagacactccaacaccagccaaaaaccaaagcgtagtcacgtattaaaaaacaaggccaaaatgaggcctagaacaacatatccaagcagcagcagcaagccattgcagccatgatacccgcgcaaatgccacctgcaccaccgccggagttcccgcggtcattggcatagtaaccctgtggcggctgttgagggtactgctgcggcgggtaatacatcggctgctggccttgggcgtaatagccctgcgggttttgctgtggctgggcatagccttgctggggtgggtagtagccctgctgtggttgctggccgccgccgtagtagtcgttcgcagcgccggggctttgatgcggttgttggtagtaggggcctgagtcgtggacctgggcagggtaggaaggtggcgggcttgtctagaagggatttatatttagcatttgtgttttaagcaggcttgcgattgattgttcttgtacttacgggtttgttgtaagacatggctgaagccgaatgtggagttcccgggatgtcagacttagtgcggatttggggagattgcgcagtagatgtggatttgggggctgtttctctgtcggattggttcggtgtatactcgaaacccgcgaacagtaaggaaagagtggtgatagaaataaagagtaggaagtgccggaatcgaggaagagttgcagtggcgcagttcggggattagtcaaccgatttccagggttttccacgttccaagactttatacttacgcggcctcattttcgtaccccgtggatatacctaccagaacaataatgcataaatctattttttgggtgttttcctttataatttttagttgatatgatagaaatgattagttacaaaatatggattgcaggaaacagagatgtctttttatagtcttatatatagccagaaggatacatagtaattggctatagatgtcggcaaaatacagacgactttgccatatatagtatatggaatatcgcgtagacagtagcctatatgaatgtgagcagacattaagcatgatctacaacttccttctcacctgaactcggaagacagccattcatagattggattcatctagagatacaaagacacgggccattatgttaaatcacaggcaaacaccccatcgaaatcccctgaagcaggagaaagttcgcgcctatacgccatgctgcccataatacaaaggggagaccaaaaactttttttgtgtttgttgaatgtgagtcaatgagtaaaaaaagtaactcccaggtgtccacttctgtctggcatcggctgctctctcgactgccagttgggtatttcctgcagagttgcgagtatggaaaaaggtcatatcggagacagtaagtggacctgatgcgattcgaatttgcgaggttgaggttcacaggaaccggggtttggttttgcaaaatccccaaatgaaagaaaagagaaagaagagaaagatctagcgtgagctcatgctgaagaggcgcatatcaatcctgtcccatttgcagcaaccttgttttgcagcttaaatgacccagcggtaactggcatagcgacctgcagtctcagacttgcgaatgatcttaacgacctggccacggcgcaacccaagatagcgggcaacaggatccgagatctgtatgcggggcaattgagactccttcagacggtagcgctcgagaagcttgcccttctcctcggggctaagcaggacgtgcttggggactagctcgtggcgggtgatgttgacgagcagatcttgttcctggaagtgttcgcagatgcggccggggacgccggaaagcaggcgcacggcagagggtgagataggcgtctgcgtgatgaagataccagtgtggaagttgttctcatcgacaaggtggttgaaggcgcgcacttgcttggttccgacacctgaggagtcggggcagaagtcgacgtaaattgtgccgcagtctggctgggggcttgggtttgctttgctgggaagtggtgtgtacttcatcttcatggtatcggtggggcgggcttggattttcatcttggtgcgactattgttgcggaactattagtgatatgtgccttttcaatgacgtgtgccggcattgactagctcaaatttccactatctcaagacaatggggcggtggacgcagggattcacgtactcggggtagcccagagggtcagcatattttgcgcggaagtcttctagcgggagtaccagctcgttatcagatacttcgtagccctggtgtgtcgccgatggttagccttgggtaaacgggcattataggagagacactgagaagtcagggactcgatctggggtacctacccggtcagcgagcagttcatagactgttctaaatgtgcgccagagccgagtcatctcgcgctcggcttccatggagtgtgccgaatccccatccatgatggagtgagaagttgacgactaggagagaaaaggtaatcaagtactatctcgcctggagggtttaaaaagaaaaaatttggatagaaagagctccggtggagagataaaggtgaagtcgaaaaatcggcgggaactttctgccagcgacgcttaagcggagaaaccgaccgaaccattttaattattccaagtttccccttttcagtttcgctttagtctgttggtctatataatcccttcaggatcctcggaaggcaatttgtctcttccttctctctgtctctctttttacattcaattcgtcgcaatggctgccactgatgcggagcgggttaagcccaccaagcccgacgaggccgcctacaagaccagtctcgctgaggccgagaaggagcacactgctgctcaggagaaattggtatggaagcctgtttctggaattgtcacttgagctctcatctgactctgggtcgcgggggtgattccgacccactattgttgattgtcctcgtgtccattatttacttgcataccatctcctcgggccaatgactgatatgcgcaatagaaccaaatcaaggccaagttggataatgccaagcccagcaaccaggattcgcccatcgtgaagaagcagcaggagctgcgcgccgaactctcagccattcgtcagaagcagtcgggcttcaagtccagccggtcctccatccaggagaagctcaacgccttggacgccaatctcaaggcccgcattactgagcagaacaactctcgcgggcggctctcattcaagagcgtcgatgagatcgacaaggagattgcccgccttgagaagcaggtcgactctggtaccctccgcctggtggatgagcgcaaggctctcaccgaggtctccaacttgcgcaagcagcgcaagagcttcgccggattggacgaggcgcagaagggcatcaacgatatcaagacacagatctccgaactgcgcaagaccctcgacaaccccgaggccaaggccctgagcgacaagtacaacgagatccagaaggagctcgataccatcaaggccgagcaggattccgttttcaagaacctgaacgctttgcgcgatgagcgcaccaagctgcgcaacgagcaacaggaaaagtacactgctattcgcactatcaaggatacttacttcaaggcccgccgtgcctacaaggagtacgaggacgaggcctggcgtatacgccgtgagcgtcagaaggctgagcacgaggcctttgcgcgcgagaagcgcaagaagatcgccgataagaagttggaggaggcctcgcagcttgcctacaccgacgagatcctcactgcacagggtctgatccgtcacttcgatcccgcttatgatttcaccaccctgggtctggatgagaagaaggatgagggcagcaatttccgtgccggagttggccgcactgttgaggccgccgagatcaagggaatgaaggttgtgcgcaaggacgacgaggaggactactttatcggttccggtggtaagaagggcaagaagggcggcaagaagggtggtgccgccgccagtgctgagaacaccaagttcaacatgaatgttggtatcattgaggatttcgccaaggtcaagatcgacccccctatgaaccagtcggatgtcgccgcctccgtggagaagctggctgctaagatcaccgagtggaagaagaaccaggctagcaagacagaagaggtaattattatttccaaggttgtcggttgtgagcagttgctaattaccccgcagaacatcaaaaaggcccaggaagagattacccgcctggaagaggaggagactaaggccaacgcccctcagaccaatggccgggccaccgacgctgccaagaagcccgcccaagacaacatcactccatcagcggaggctgagctggctcaggagaaggatgccgtggccgacgttgaggaggagctcaagaaggctgcgatcgaggaaaaggcatagattcgaggaggaaattatccgtacatgctcaatgcgtcaacttatacatgaagtctagcgtttgtctagcattctcactgcgctttttctttatttttattttttcgtttggctcttgcatatgcattatatctacgattcataagtggacagctggttgtttccaaaaattcatataatcgaagccttttatttcatctagcctaggagataagcccagtcatactctgatcagagttgtacattatcatgtgatatgatattgaattaacttccaaatacttgtcagtcgtatctgtcgtgaatgtatgtaaatgtaggtagtatgtagttatgtatgggtacattattcgcaagactccaaagagaaagagtgccagttatgtccaagccgttggaagtatccaacggatgtcgggagataacaccaacaccaacgctaataatcgcatgagggggaataaaaagagaacaggaagcagtaagcagaaggtatagagggggtacgagatgtgtacatagtctcccaaaccccaaaagaagagactccagtcaaatattgcatgtacaggagacaacaagcctcagccgaaaatgtccagaaaaagaaaaaaagaaaaggaaaacagccgtcacatcatgtcacatcacatcacatcaatattggaagtagttaccgatcatttcgcgataacaaccccccaacatcatgaagctcgacatcagtgtcaagcgtggaatccgaagaaccgggcatcgcaaccgaccgattcccaaaagccgaggcgggaaacggcaggtccgccggcccaggaagcggcgagcgatgcccgaagatagcacgcgacggactgaagatccccaaatcctctaaaaaggcacggctgccgccgcctcgccggcgctgcacaggctccacgggcgaggacaagcacgtctgggcgcgcacatgctccggcccagactccggcagggctcttgtcagcaaaccgccgacatcggagaacgacacgcggcgcggcgtgtctgagggcacgctttggcgcggggactggtttgtgcgcaggtactcgtgcggcgagactttgcgctcgagactgtctgttgtcgaggcgtggtcgtcgtccgagcgacgggttgtcgtgaacgaccatgctggatcgagggcgccggttcgtgcggctggtggggtgatgggcgctggtctggggagacgagttgtgtctggggtgtcggggattgtgtagatgtctgggtctagacggatgcagaggccggttgcgagctcggagtctgagccccattggttttgcatgacggtgtttctgcggaggaaggatttgtccatgctttctgagacggaggctgagccttgggcgcgcttgtatttgagtttcttgacgccgcggtcgcggacgaaggagcctatgacgaggacgttggcgactgctgttgcggcgagaatttcgagggaggcgagaagggaacggtatgattgggcgccgtcattgtcaattacagaagagacgcggtaggaggttacggcgaccaatatcagagataggcagaataggctggatagggtgagtctgcgctttagaggcatttgcgccatgaggattattgggattgggatagccacgaggaggaggtcggtcagcacgtcgcaggaacccattgttattaggttcacgtagccggcgcggcaggttgggcccgggtctgggacgacctgcccgtagtgnnnnnnnnnnnnnnnnnnnnnnnnnnnnnnnnnnnnnnnnnnnnnnnnnnnnnnnnnnnnnnnnnnnnnnnnnnnnnnnnnnnnnnnnnnnnnnnnnnnnnnnnnnnnnnnnnnnnnnnnnnnnnnnnnnnnnnnnnnnnnnnnnnnnnnnnnnnnnnnnnnnnnnnnnnnnnnnnnnnnnnnnnnnnnnnnagccggcgcggcgggttgggcccggatctgggacgccctgccagtagtggtagaaaggctggcattcggccagggttgcgatgaccacggctattagggttgagacaaggaagtaggagatgaagcggaggaagaaagttgtcgatcggcgccaggcaagccctgtgactcgctttagaaattcgcacatggtcactttggtcgtccagatgctatagtcgtggttgtgagtcattttgaactaatccaaggtgaagacaagggtgtcttacaagacggcgtagaagatacgcgcagcaagaaccagcttactgcccagctctcgattcgcgatctccttctctgtcaagccgatggtggtggtattgttggtccccaagatgagaacgaaatgcacgaggaccatgcgaatcagcaagggaatgacgctgatcatcatgaccttgtcctcggtgaaaaagcgctcgacgcgaatataacgaccacataggcgcacgacgatgatcaccaaggagaatatggtagcccaccagctcatcatgagcgtcggattgatctcagatctgctctgtatggccggcagattctcggaataaatgccacgcgcgactagcgacatggcgctggaggccatggaggccatgatgcgaaaacagcagtctcgcagaaagcgattcagaatgtgcttttacattgctcgcacgtgggaaagtgtggggatgttttagctggttatggggcgaattgcggagactagggatggaaagtgacgatcttgagatggaagagagatgttctcaggtacgatataacggtcgagggagataggggcaattaataataagtcgccaaaccttgtcgactcaaggccaagtggaagaggggaaatatcaaggatgacaagataagcgaagcctccgtataaacagccagtgaggttcgactggctaatctgggagattcatactttttcaacgacctgatagatctgggtgaatacatcgaacaaagaatagaataatcctctttagcatgacattgttgaccctggcatacaatattcctccaatgagggcgatctgctatagttacggtgtacacgtggacgattaccactttgatagatgcagtcctacgttgcatcgacagggtataaaaggcacaatgtccccgataagcgaggagctctggagagttcgccctggacttctgtattccacggaatctcacgattatctacctccggccctgctccgtcggggaatgttatctcccaaaaccttacctctaaattaatcgcgcaaccctcatccaaccacagcggacgccgaatcttcccgctttgcttcatcgcgaaccgactcgattcccgacccagcacgcagcccacccaatacggtccgcaactcctgtaggaacttggtaacctccgcctccgtaccgacggtgatacggagacagccctcacacccaagctctttcccacggaagcggaccactacaccacgcttctccgccatagcctcgtaagccgcaagcgcagtcacgttactcggtcggccctcggcgtccaggatctccacgagcaagaagttcgcatcgctaccgccaaggaattgccccacaccggggatcgccggtagttcgcggagcaaacgatcgcgttgagcgatgatctgcgagcggaaactgtgcatcactgccatatttggccctgtgagtgccgcggaggcgagcgcgcttgtcgggctggagatgttataaggcgctttgaggctgttgagcagacgtgcgacctccgggctggcgtaggccacgccgaggcggataccagccagaccgaatgccttgctgagagtctgcatgacgactaggttgggccattcggtcacccactctgccaagctggagccttcgggcgcaaagtcaatgtatgcctcgtcgaccaccacgataccattccaggtcgggtgttcgagtaccttacggatgtcctctttgcggatcaggttcgcggtcggattgcccggcgagcagatgtaggccagcttgattgatgggtcggctgatagggcctcgttgactttatcggcttgtagatggaacccgtttgtagcatctagtggtaccttgacgatctcgaggtcgtttacctgtgcgctaacgctgtacattccgtaggtcgggggacatgtgaggatcttgtctttgccgggaacgcagaagcagcgtagtagtgcgtcaattgcttcgtctgagccaacgccgcagaacatgtgctcggggaggagggtcttcggggtgtggtggtgggtattgcggaggttgcagaagagctgcttcaactcaatctggtgactggtgacacatattgttagccaaattggtctgaatgagattcgacagtagaatttcactcacggatcggggtaacggttcaggccgagaaagtcaatctccggattgaaggctcccgtggcattgccagcctgggaggactgcaattctcccttgctgctcagggcaagaccaggcccgaaggcattctcgttggcgtcgaggaggacgttcgtcccatcatctttgtagtcactgactcatttagctcaccgataccggtaatttggaaagggcagcatactctctggcgcatcggtagggctgcaatgccaggatattaggccgggcgcatgtggccaaattaaacggagattttgaagccattgtggtgaccttgggaggagtgtgagacgttgagcaaaagttggtggggtgctcaggtgggtggttttatcggaactctatgagtcaaatgccgatctatgcgtgtatatcttccaaggttcttatgagattccacatttacatatctttacaagtccaatggtattacagacattacggttctactacaatgtcttctgaatatattttcactgctgagaacacaacgcggggtaggtgcttttgttggtttcagcatgtttgggggaaaagatattcatatgaactatatctttaattctttttaggtgacaagaggtggtcagtcagtgaaacagacattggtcaatgcccttcgagatcctacaggataggacatggtatgagaactcggtataacaacagtgcatgtaaacaattaccaagctactctttctctcagcagcaaggctctgaagcaagaagcaagcagcgttaggcgcatgaagatacaatcaagcaataagtattgtcgttctgccattcaagtctttctgaaaattcgcttccacaaccgcttattaccaccctggccgggctgaggttggccctgcgttttcacctggggttttcccaccactggcagtaaaaagaaagcctccaccatctggatgacacaagccgggttattgtcatactgtttctttttgaaatcctcgacaaagccttgtctctctctcgcagtatagttgaagcctcgttcccttgaacaacaatcacacgttggcgtacagtgtccaatgcctttgtttctttctgttctttcgtggcgatcatgacagcatccacagtctcgactacaacagccacctctcttcatgcaattttcgactagttctttccggagataccaagttgtatcttttcgtaggtatcatacgaccgtttgatgggccaataggaagcattatttcggcaaggtaaagcttgtactcggcctcgctatattgccgtagtagaattgtaagctcctgattataatattgtgctgctttatctccatatttgtcggctgctatcttttctataacccgaactttgcgctttagggatttttcttgttggacgatttctcggagacgatattcggctattattatatccacaaagacggcgatattgaaagatcgggtgccataatggagtatgcgtagttgttcttttccatgagctggggcttttgcgtagtgtgcgtcaggcaccaaccttgtctcttcaaacatattgcgagcaccctgcctgatcatgctgacagtttcgaaaagtcaaggagtaaggagaagaagactggaaaagaaagagaatatggcatataaacggacgcccagatgaatacatagtatccggatgacaagagccgctcccaaatcgggtctagcccaaagcctaatcggtacatacctcggaacatccatcaggtaggcgagcagcttccaacgctatagaggggaaatctggaaagaagacctccacaaaaatatgagaaggccgcataagtgaacgatcatgtccgattctttcagatctttaatgatcaatctatgattacataagcatgatctccggccccggggccgaggtcggccctgcctccaagataggcaattttgagacctcaactgggtgaaggaagtcaaaaaaacaaatgtgctcaagaaatcaagcgtccaatttttttatctcaccttgctccttttagcacatttataccaacgcctacaagctagacacccaattgcttattccgcacatttccgattttatcagctcaaatcaaaattcctctcactgggttttatgcaggtcctttgatattggtggctctagcgttcgtaatgaacgaaatggccctaaaaggaccgtcaattttaccggtggatatcatggaatctcaattgtccacgattgacctcctaatggcgatgttcccgtccccgggcgagctggaaatccccgaatccacaacgcagtgtgttgagaaactccgcgactggtgcgagaatccgaccttcacacctcccagaattccctcaagcctctctctcaccgtctgcctaccaattgcagacggagacagaacaatacaagtcaacatttccgtgccactgcaatgtgataatccagagacactggaccaatcaccgtcattgggctattcacttcgacaaccagaatggatgtccagagccgaagttgctggacttactgcctcaataccgcaaggcgatgatgctctagaggcattcgaatatatccaggcagaagccagccgctttcttgaaagcaagcagtctcagaccgtggccccagaagacacatacagggggccaactgtccgagtctggttctattttccatccctgtcaacccgtaaaaagagggatgacatggtcaacctcgcgccgggatatgctctgacaggctttgtgctggcgggcaagccgggcgtattgtgtcttgagggtgcttcgcctgatatcgactcttatatgagtttcatcaagacacattcctggggtgatatccctagctatcagaaaaaagtcagtgagaggtttcgagagacagaaggtgtccagagagtgttttcggggatggaggaaattacggactcgctcggagagcgaggtggtcagcgggccaatcggggtgatatgcaagcactggaggcgtggttggggagtagaggactacaagaagcatttgaaaaagtcatattctaatatattccattgaacaggtctgtttcaataatctcaaccgagatttcatcattactgtggcgtagtagcagctggttgatatcttttgcagcttgataccacaattttgtctggcgttggtttggtattctgagagagaaaggaagtgcaggtgggggagtaaggtcatacctacctgaggcaaacaacggtctcaaaaataaagaatgagaggatgaagaatagcaggagcacaaatcagcattgataaagtacaaccagtttgaggagcggtctcatacttacctaattgggagagagatacctagaccataataaaaaccaaggttccgggccatattcggtcattcattgttcattgtccattgtttaccctaaacatttgtaacccaccgaacgatttctcaactcatcaactaacatccatttgtccattttgcttttaatataccctcgtctaatcgaaatgccccctgacttctccacattgaggcatcgtgagcgccaacgggccgcagcctacttacaggctcgcagtgaagtcattgccgctatcgacgcgatttataagcgggtcgaaatctacagctctgcccaaatcaaccccacctcctacaagtctcttggtattgattaccgattgcttgagctagatgatgatgggaaacatcttcagcccccaaactccgatctctccaccccgattttcttcgagcctcgaggtgcaacgtgggtggcccctgttcgtattactgatgtcgaatgtgagggcgatctaagggcaatcaccgacggatgggagaacgtcaaagacaacccactagtccagagctttcatgcccaggtctggtatgtctatttgggtttggagcggatgtttttccagttccgccgagagttctaccctgaaggagatagcagagttccacctaaccttaggcaaatatccaaatggctgaagaggtaagaaatctaccgcctttgcgatacgattgggatactaactcacgttcgctttatagtggaactattgtaccatctgtttttgccgaaagattttactcggctatctggggatcaatgcgatgggcaccggcatctgcctttgtgccgaagaaactgttatatcctggaaaaccgcatactctaatcattattttgattcaagaagaacccagcgaagagctatctcgcgcagaaatgatgacccttaccgcagccatgatcacgcgtcttgagggagaggaatgtttagaatataacactattcctgtgagtatggatttaagatctatatacttatctttcatgcaagctaatatatgttaacaacataggttatggctatcacgatttttggaagaatgaaagctcgagtactcgaagcccattctagccagcaagagctagtcgtcaagaagacccagcttcttgatttctcgacaaaccaagtcgctaacaagagcatgaatattctgcttggatttatggctggtgacctggtcggagatcctagaggacccacagttcctacggatatttcaaaggtttgtgctccagatataatcgacttgggaagcacgctgacaatgaagtagacttcacgaacagccgagaaggtaaacaccgcgaaaggaggaaccattcggaagatgttccgcaaaatgcgcccacgagtcgtggcaggtacagagccagagccatcggagggagctacccagtaaccaaacttccaatggagccttttattacgctgcaacggtgacaggggattaatatctacatctggtcctaagtcacgcggcaagaaccaaagacaccttggctattcctaaactcagtcgctagttcacatatcaataagtctttacttggaattgaattgatttgctcaaagtctcttacaccatctgtaagaataagatagaaagtgaagaatataatcacgacagttggtttttatttcgcgaagtagacgacaagcaaggctgagtggcttcaggctactggcatgacaatgaggatggctgcgagaacaaccctaccgaactcatgcatatcattgactgaccctgtgtcgaagggaccgaatgttctcatgacgaggaatgcgtcagtgttttgtccattgctcaaacactcttcgtatcctttatcgaagggcacgaacgtgatgaaaagctcatgtcggtcttgtgaaatcaataggaagctagaagataggcgtcattggttattcaagctctttgaagccacttattggacgtcgaatatccaaagactgttagacttactgctcgttgaagtgggccatctgcccgtggcagctcatcgaccaccccgcgacttcacatgcctcttgcgtaaggatagcgtcggtgtttacttggcgcattctcctctttacttctacgatggcgaagataccaatcgtattctttgaccgtaatgcgccatccgtatacgcggtagacttggtctggtggaattgactcccgaagtgcacgcggttaatcacccactctagctttgagtggacaagttgagagatactttgaagaaggatgatggcggcggcattcggtattgcctcgtcctcggcatcaggaagttggcccatttgcatatcgtcacgaataccgtggacagttatcgtttgctcttgtaatcttcttgcggtagagaaagaccctggccacatagtactagtctccccgatatcgtcgattgaatcatttgtatcgaggagatgcatgtatcgggaccattcagccgaggcagcgaggatacccgcagctgtgtctaaagcttcagtggtgaacccaaattggtggtatttgtcattgaaagacgcgacagggtatattgggcgcgagtacgagcggatcatcgcagattggacctcggtggcctccgaggcggacgcaatccagtcggctgggatggtatggatagtttcatttctcaagccggctttgtggctgacaaggtcattccaatcctcctcgtctgctgggatatagaaatcatcgatttttgcgagttgacgagcagttggctgtttctgggcttgagccatcgttctaagtcctcgcaaaggtccaatcagtaagacacacgaaagggggggggtctgggattaacagaaatggcctcataatagtgagctacaatacctgaccagaagtagaatgcagaagaatttcgagagatttatgatcggtgatgagtgatgggtgggttgtaaaaaagtacagatgagcttggctaggaattatattgcggtgcctcggtgatgaaagcctaatttaactgctgtgggtgtacgaggggtatggtctacttgataggaggggatgccagctgagtaacttctgttacgatcaagggtcgttggttccttccccgtaggaatcgtgccttcctaaggcggaagcgagcgtaccgggttttgcatgatttgcaagggaagggcatagaataatgatttattttaagcggcatacggcagctagctgagcaacgagatgaggaatcagtactccgaggcttcaaagtagggcaaggccagcgaaatatctgggattgttaaagggacccccctttgaccaatgcgacccccccggcctattttttgtgattcggcttaccgccttccacaccgccttagtgtcgaactccctagcaagacggtagatacctacaatttgtatataaaccactaacaaaactaagtcacgtttatcacatcagctacttcatcgtcaacaactactgcaacaactactccaaagaccgctctatcatcataaatagattcaaggatataggcatgagataaaatacacgtttttttctgatcaaaacgtaaggtttttttgactatgtaaaaccagaattcaaaagtgcagaattaagtctggcaaaattgaattgatgcttgattagtaagacaaaatactgaaaagtcaggcagacgggtcgggcgaattagaaagaagaaaaaaaataaaaaaataaattgaatctgtatagtttagacaaatgaaaggctctatgtagtccgtatgtatcgggtccaataaaaattccctgctgatgcacagataccagatacatcattgatgattttgatatatgggtcacaaaaatccacaacgcctccatatgccacatgtctgcaacttagggcttttggtcaaatatactcgagtcgcctattctgcctttgtctccttcggctccaatgtcttcggtgcttcggcgggctttttcaccacagcggggggttcgggtgctgaaggggctgccatctgagagtgcttgtgcttctcgcgtttctccataaggtaagtccaactcttactaaggcctgccgtgaacggtgccttgatcgtctggacagtacttggccagcggattgtcttctcaatggtcttggagacctcctcctgaagatcatcatctccagcaatccgtcgctcaaacgaaccgccttcaggccggcgaagaacctcgtccgaatccttgctctcctgcatcaacttattgaaatcggcccgggggatgccaaagcgagactggtactggaagtacaacttttgccggaaagcttcaggcagacgacgaaccatgttaccacgcatcacggggtccatatcttgcgccatggctaagatggcgttcgggtcatcgatccaatcctcgttgctgcagcgggggtcctggaaagtgacattgggcaaattttcgatgagcggtgcgtaaagccggcggaagttcgccatttgtcctgaaacaatctttcgcaccttgccggggtcctcggcggggaggctcatgcgtagatctcccatgtagctcatacctgcgattgtggtatataactcgaattcactgaatctctctggcagtaatagcagtgcaacacgcaaagcagacagcaagttcatttggttggccaatcgcaccttcgggtggtcacgcaagatcttgacgggcttctgcagacgaccggcgagatacatggtgtcccactgggtgaggtctcgacataacgtatctaggttcaccacaccatatttgatcattgtcccgttcacggtgatataaggatggaagtagacacccgcgccaaagcggtcctgtacctgagagaccacgtacgaccccagcgagcctaatgcagaataatgatcacgatgctggtgtagattgatatcatgccaatgctgggagtatgacactccgaaaatgaagtcaatcatcttcccggagcccttttgcatattttggatggccgagggtgccgaggggtgcagtgagctggatggcaccccgctgccagtctgcggaaagacacccgatccataggcaaatgcgtagcgaattggtgctctgaactgccaaaggatcattcgcaatgcctccttgaaatcttggtttatgaccatatgctggttgactccgaagtccttagagggaagttccgagaaattggtaattgacaagttcggattttcgtcccagttctcgggtaacagcagagaggatgacgtcgagaagtaggaggaggatgagttgttggtaaacaccttgcatagcagatgcgaagagctggtatttgccgagggccggccattgtagggggtaattggattgcaattgaatgacaggaagcgagtcgaagaaggaacaatacgtcgggaggagcgaagggtgcggcgaagggtgcgagggcgccagagagagctggggttagctcctcgggaagcaaccatctaacagataagttgtagcgggatcatcgggtacggtaggggatcagacatactgttactcccggcatgattagggttgaggcgaaaggaatcgaggggtgtagcgcaattaataaagtcaagtcaacgagcccgcatataaagcaaatgagtgagtgaattgaagtgaaatgaatttggacgccccccgtcaacatttccggctctgacgtactccccgtccctctccgcttctaattcgggtgctgagtcatggtcacgtggacgcgtgtcgaaggatgcataacaaccaaaagtaaacagacgcggaggatcaacaaccacgactctttcgacaaattcgcctacttccccgacgaagggttgctttaaatgttgagcattagtactaattgtatctgacctccctgatatctcgccatgggctctgaaatggatacctttgcggcccgcctagccagcttcgatttagtgctgaagccggagaaacgcagatcttccggcacaaaaacacccaaagcgattacatggccgcaccagcgaccttcaccagctgaggtatgtcattcttcgaagagattacacgcgccgtttaagatgattgacttggcgggattatagttggcacacgctggattctactacaaaccatacgagacaaatcccgacaacacaacatgtttccagtgccaccgggcgctggatggctgggaggaggacgacaatcccatcacagagcatctcaagcatgcgcccgactgcggatgggccatcatgatggacctccaacagagtagctccaaccccgcctcgattgaagaccctacgggcgaccgaattacgcaagcgagactggcaacatttggtacagtgtggcctcatgacgggaaaaagggctgggtatgccagtcggagaaggtaaatcgtgacttcaccgtattcatattattttggctcacaacaatgacagatggtagaaggcggatggtatttctgccctacagacgagagcaatgacctggccagttgtgtctattgcaagttgtctttggacggttgggagcccaaagacgacccattgtgagtatccatcgctctttcttagttggacgattgctgacttaccccagtgacgaacactatcgccgctcctcggattgttcattctttgtcttcgcccagccaccaggaaagaagagcaaatccgctcgtgctaagaaacctcgggtttccaaggcatcctcccggctctcaacccagtccgttggttcagttgcatccgaagcgcccgatatggaagtagatgacccgatgggccaaagcatcatgtcccaatccagcacaaaatccaaatctacgaagaaggcaccgaagagcaaatcaaaggggaccaagactaagaaggaagaaccagcggaggtggaaagccaaattgacgccgaaattgaagaagtcgcccaaacagagcctgtcaaacctaaacgtgcaggcaaaggaaagaagaggaccagtgaggatatcaaggatgaaccaaacccagttgccatggaggaaaaagagccatcgcagccgccagcagaacctccagcgaagagacgcgacacaaaaacacgcagcagcagcattactcgcagctacaattatgaacacagtgactctgcaatggcagacgcaaggccggtggatgaagctacttcggaagaagaaaccacgagaggtcgcaagcccacgagaaagagagcgtccaagacccgcaaggtctccgatgttcctgttgcatcaaaagccccgtcaaaggcgcgagctcctcgtgactccgagatcgaagcggaaatcgaagcaggcctcgaagctgatatccccacacctgccgaacccgagcctgagatcgaggctgagccagcagagccacgggcgtcgaagaagacaaaatcgagcaaaaagtccaaggctgtggctagaattcccgaagcgaccgtgcataatcaagtagaagatgtcagtgatcgcgaggaccgttcagatccccacgtggaaccggttgatgatgaaccggaggcgccagccccaaagaccaagctggcaaaaggatctaagaagaaggggacaaagaaaaccaagaccgaggagacgataaaagcacagtcgccagagcctcgagaatccttagggctcaggggtcccgatgttcgggatgattccgagcgtcatgactccttcgtctccgtcgagattattagcaaggagccggagaatgcaccggagcccgaagaaccaatcgccaaggctgaatcgaagaagatttccaagaagaaggatggcacatcaacgaaagagaagaagtccaagaaatccgagaaaaaggcggagcaagctcctgttcttcaaccctcagtcgaagaacatcgcgccgaaccgtcagtcgaggaacaagacgatgaattcgagactacagacgatttgcctgaccagcttgagatagtcaacccttcccctccacaacaaatatctcccgagccacaatctcatattaagacacccagtctaccgccaaagactgccaaacggtatagcgatatcccacacgaagagcatcttgcggagaccttagtccaaagccagatctcccctcacgaagtgcatgagcctcgacggaattcaaaccgctctaaccgggccgtttcaccacttcctccagcccaccaaaacactccctcgccgtcaccccagtcatcagatgcagaaaaccggccgccatcgcggccctcagcatcccgtgcaccagtccaaccaacacccaagcaacctgagttccgagtccccctggcagttagtaccccatcgccatctaagcgcaacgccaatggtggattcggaccttctggccatccatggacaccggtggatattgatgaagtgctgtttggagaggctagcgagaaggaaaacgcagatttatccggactgttcagaggcgcgaaagccagcttgactagcccagagaagaaaatgacagtccaagaatggatcgcgtggaacgcaaagaatggcgaagaacgactgaagcgagaatgcgagcgacttgtcagccaattcgagaaggaaggtggccgagcaatgcgacggctcgaagctatcgagtgcatcgactaatcaacaggtacgctatgtttttggatgatatgatttgcatgttaggcgttatgctgggtgttggggaacccttgttagatctttagctcgcaatttgaattttgaaagtgccattattgcacatgaagaacatgatcagtaaaacaaagcctgggaaatatgccaaaacaccatgggtatcaagaatagaatgcgcgcccgagaacaacactcaacaaatgatccccaaccggccctcccagctatcatcctccttcttaaccttctccttcttccgcttctcagtgcgcttgcgcctcttctcctccctctctttggcatcaatctcctcccgctccttgagccgcacccccagatcaagctgccaagccttgcgctcttcctcgtccctctgacgcttccgatgcgaaagcatcctcaatcgcaagcgcacgtcctcaacattcgccctcttcacctcgccactctgccccgtcgcaatcagatgctgcttgctgttcaagtgctccacaagctgcaagttatccttgtaggtaagatcacagtccttgcagtaaaatccagcgccgaggccgcgtttgcccatccccgagcctgcgggcacaatcatcgtcttgcccaccatggacgcgacgtccaggcgctgattgcgggctgtggtatcctcgagcgagctgtagtcgactggtgcgtggtatttcttgcccagtagcttcgcttcgtagcgggctttgccttcggctttgcgctttgcttcatcgtcggcggcttttttggcgtattcttcgcggtcccaggttttgcgaaaggccgtgtccgacaccggggtgccgtaggagtttggtcctgacatctctgtggttgatgtgggtatttgttttggggagatgtagtggaggttggtgagtggcggatctttaaaagttgaaggtcggtttgaggccgatatggaatattacataagcgatcctaattgggcaggtgaggttggaacagaagtacttaagtggctcaacacacagcttgtctttgttccaagtgttccaaggctgtttattatattaagatgtcctagcataaagaaatagttattatctacaacttgtgcttattaaatacgataatatgtaggatgtaggtaagtaggaggatcttatcatcacccattcaatcatatgagactatatatacatccatggcctcttggaggctgaaaataggcagctgttttggaataatcaagtaccatttgatgattgcatcggggtaaatagctccaactagtaatcagtgtcggtggattcactttcaggcagcagttttcgacccgcatgtataagatgaacaatatcaccacgtcgaatgtacacaattgagccgcaaagaactcggaaaatatccaaaaacatggagacatcccaacacccttgttctcagcccaccagcgctaacctaatgactctcccctcggaactccatatccaaataagcacctacctttcctatccggacgccctagccctcaaacacagcaaccgtcacttctactcctcagtcttcacaggtgtacgcctgaaagttgcctggctcgtcgagcgatttaagtgtggactcgaatgccccatggagaagtgctcgttcagtactgacgagtctttttgcaatgggcgtgtacgcggcattatggaacgccgtcggtggcatcttgagtgtcgtcaggttgggaatggttgtctgcttgtcaatggccagacttgcccgccgcattcggtgcccgcttggttcaaagttagggcacaggcaaaaaggagagttgtcaaggcagtagagagctggggacatgaaggtttgttccctctttggttctatcttattcctgtctgataaagacatgagctgatattgtgttgcatagcctttgtgattggcattatggctgttctgctgaacttattgtggcattttgcccagaggtgagacattgtcttatgcttccttgcgtgtggtttgaagacatcgttaattgaactcatcagaaattggtacctcgatagcagattgagaggacattatacgactactcattgagtgatgattcaactgagttcgggtgtcaattgacgatcagccacgaattggtgtatagacgaaccatcggtcgccataagaaacaaatcgccaagcaatctagcaacacgctcacaaaagatcgctacacaaaagcgtcttcagcatcttcaataagcatgatgatgtaatggagcttcgcagaatattcgatgcggagaatcgagttagaccctgacggtaatgcatcatcaggagacacatcaggagacatattctcacagacaaagctgtggagacataatctctgaaagcaagcttcctagatggtgtgatgcgttgactacctcatcttgcggggaatcctagccctaatccggatcttatcggtgacgtcatgttgacgactacgcataatccctacatgtatataagttctctcgcctctatgttcatcaccaacaatctctactttcctccaccctttcattattcgaacataaaacgatatgtctactacaggtgccaccatcaacaccacgacgggtaaccaccccgtggacccctacaagacccagagcttagaagacccgcctctccctcagaagatcgaagagctggttaaatttatctccgatgttaaatttggcatgttgacaaccaagcagtcagagggtgactatttggcttcacgatgtatggcactagccgcaacggtatgagcagagccacagataaccacaattcaagggcaatcatgctaatccattacccaaaataggagcacggcggcgttgacctcattttccacacaaacctcttctccggcaagacaatggatcttactgtacacccaaaagagacaaatatgtccttcctcgaccctatcagcggagcctgggcctccatctccggtactgcatcagtgatcggtgatcccgaaatcgtgaagaagcactactcgcccggactcagagcatggattggcgatatgggcgatggtgtgcacgatggcggaccctcagatccccggattggcgtcattaagctcgaggctaagttagtcacgcatgttgttccccacaggggcctgcttgggcgtgcctatgaaaatattaagggtgccgtggagggtaccgttcctaatgtcaacggcattcgagagatgagtttggaggaattggccgagtgtatgtttcctttctctcctttttcatctttgaatatgtgccacggacatgctaactggtctctgtagggcgcgtgacgcatcaggaataagtgtatattactatgaaaaaggagtacgcctttttggttaggaaggtatataacgttttgaatggaaataaaaatgaatatatttgaatgcatatgcccctcccctaaacggtctttctgcttcgtattgttcactgtaaccagtctatatcgactgagatctaatctgaagacgtgggtaaaaagccgacttttataagttactcggcgctcttgctgacctcgtagcccggaggtacgcaagagcccttccgatgctcgggtacgagttccaattttgttttcagcccagccagccacattggtccgtaccgggacacggccagaacatcatcaccgtcacagactgtaagctttagtgtcaaccaaacgtgaccaaacctattcggcagcatcaccgcaccggagcacccatgtgtacggctaagcgagtgaccatctaatacaagcagaataactatccactttgcagctataaacggtgctgcggcgtctatgctgttggcgctgctgtttctggtttaatgcttcaatgaaaactgaacagtggaaatatgggactcccgttctgggcacataggatgaatctgatattcaacaggtcccttgaaggcaagataaagaggggaagcttccaagctcaggtaggatgttatattattctattactagccgtggtaatatcattcagccaggggggaaaggccagctgacatgcaaataagagactaaatattccaccagggcataagtctctcattgggtatgctcaacggcagacatacctcaagtactccgtggtctagcggagattgtgccgtagccctcttgctgatatcagaacaaacaaacattatggcatcacaccgaagaatgacggttgtgaaacaagtcggccggaaataagagacgtcgttcctgttctcatcatcacgttaccatttacagatttaattaagcgagcctatgtcgttgtttgtctcatttgtgaatagtggcagaagcctacctcccttaggataactataagaagatgaccctgcccccagaacttcttcttttctttcttcttcagctctctttgcctctggcttagatcaagtgtagtatctgttctattcagtttaatcgctgaatggtctgcattgcagaacgtcatgattattccaatatttagacctcgcgacttggcctctgtgcttgcacatgcttcgttgcacagtgtcattgggcttacactaccctcgatcgacgcgaacgccttttcatcaactgttcggcttgtccgggcgcttggagaagatctctgttcgtctttgtccagtggttccatttattcaccgccttcttgaagcctgaaaatactggctggcaatattaaccaatgtaagagttctgccgcaattgcatacccgtacaaagtagtacctagtaggtacaatgtcgggtcagtccgcaggcgtgatccctgggctgagtgacatctagctgagatagaaaatggtagatctaggattaagcaaatcctgttaattatatccataaaaattgtccaaaaaaaagatatagaaagaaacatttctttcaactcagtctttgagcaatggccatctgtataaaatacattgtcaggtatgtccatcccatattcaccccattcctgctctccagtctcaagatcctcgcaatagatagcaaaatgggctaaacagtccaaatgaacacggaccaatccacggtagtactctccatagtcattttccgggtcttcggggcggaagaaagagtcgataaagttaacataaccgaccatcccccccggtttatcgttaatctttggccatggtagcccctgttcgataacagatggctttctaggcgccgcactggccaagattgatcgtatacagcgatcatctaacaaaagtgcgtaaccaaggcgaggaatgccactagatatgcggaggccatggctttcgacccattctttatgtcgacgttggataaccgcttccgacgcgccctctaacgcggggtcttcaaagataacattccgataaccctcgcggaccatttcaacgcatttgaggtcgaatcggtgccagctgcgctcgtaaaactccaggtcagccatacaggcctcgtcgagcttttcaatagctctagtccagtcttgatcggaagtgttgagataggaggtacgatagatggcccatccccatggccaacccccactcctaccagactcgtagtataagaagtgcggtacagactcccactcgggatttgcatgctgtcgattgattcgttcgacaaaagtttcttcgggtgggaattcagatgaacgccatggtgtaggccatgactcatcgtgaaagatactgggttgacgtggattccagggcatggttccggcaatggttcttgcaatggtgttgtaagtgggtgcatttagttggccaggaacttccacggcttgaatattttgaatatcgcttagcgcctgagtagaacccgattaggaaggcggtactggaatagcggtgtcctccatgatgtattgtcaataaaatattaaaaaacgaaatagcacgacggctgcatgattcgaacatgcgcccgcgaacggaattgatttctagtcaatcgccttagaccactcggccaaaccgccatattagataggtagcccgctccaaatgtgtggtagcccgctccaaatgtgtatcatagagctgataggaattgtgtatgctacgctggctagcctgaatagttctcgctaaaaataaatactaggaactctcgtgaaacatatctccataagaaatgaaatcttagtagactattcggctcaacggagttggtttcttcctagatagctcgagggctatagtaaatctaggattaaggaaattctgttaattacgtccatgtactccgcagcagcaaaaccataaaaaagattgtcagaaattgtccaaaaaaaaggatacagcacgacggctgcatgattcgaacatgcgcctccgaagagaattgatttctagtcaatcgccttagaccactcggccaaaccgccgtaattattaatagtaacatccgaactttggctctataaaccagagataataaatgtactatcaatagtcagttgaatgcagtcagcgaaccgtacgtagtcttattataatatcatgaataccgaagaactcttattatctcactatctctggtatatcctactacccctcaatttcccacatgttggactggaaatctgtaatgtttatctacccccgaggcaatccaaggggaatttgtacaaaaaatactaccgattttggacttaaacatcttgcccaagtgctcaccctttcactcaatcagtatcagcatcatcaaagaactcatcccagctgtacgtcggcccgacacagtaagcattcccagcaaccagctggtcgctgcatttatccggacccagagaagggttcacatccaagaataaaccccaaggaatcttgctctgtatgcatatcgtagtgcaggtttcttgcagcgcttcatttgtgacaacatgccacttgccgcaacgagttgtcgtcccttcagcaacagttgagtttttagggggctcgatttgcggaatgacatagccatcagcggaaccgggtgacgttggatcataaggcggggcagtggcattcgaagcaccagactgcggcgtgaggcaaatgacatgaccatacgcgacatcactgacaatatgaagattagagcaatcgtagttgatccatggattgtatttgcgtaatgtagttccatccttgtatccgacgccttgtgccttctcgatggatgtacagctgtcctcgcctttgatggtgtagacggtctcgcattggattggcatgcacagctttgtgccgacttggatatccttgcattcgaacaagttgtcgtgtcctatgaacagggcggctgaggagactttgtacttggtagcaatcgagtcacaggtatcgccggccacggttgtgtatttgatgccagatacgcacgagtctgcaggcttgtatggatcaattgttggttgcaggggatcgggaatatcagtaggaatattgaggttgcattttgaattgatgtatttgagttgggattggaagtcgatgtcgtatgcggagtagggtgttgattgcatcattcggtaacggccgacatggcatgatgagcaaagttcagcagttggcatactatccaggtctgggttgaagccattgattacgtctatgtgtattcatggttaggatcgatcaagtgcaagcgcaagtaaacgggggcgggggatgcacgcttacctccacagtatttaccactcgtggcgtccttagcacaggtctcattccaccctgcccaagtcgccccacctttcatgttgaagggagccccagtctcttcattgctaccacaattggtagtaacttggtgaaaccaagtctctatagactgcccgcaactggaactgcaaaccagatcgcttagagtgtcgttgtcaaacccttgtctccatctaggcttttggaacatataaacctcatcgtcgcagtcaattagcctagtgatggctgtttggcaaatgggggacaattgtgacaaaaactcttgctgatatgttttatcgtaaaagtagaaccccgtgaacttgcgctggccaacgatgtcttttgctttgcggaaccacccaagcaaggatgataggtatccatttctcgcgtctttcgcaaatatcgcagtctcaccgagtgggctgatagactggacaattgccttggtcacaagattgacgatccagatatcgctactctgctcgacgtagaaagccttttcttggcagttgtttgtttccaaacaatcttgggaatatgagttgaaccaactatagatgcctaggaaagtcagcaaaagcctaagttaagaccgaaaaaaagaaaacatacctgcaccaagcatatagattgattccgagttaatcatccgtaccgcccatgagcttgtacatgtcttacactcattgctgtccgggtcgttggggaatttccccagttcgaaaggctttggcattggcggagtgggttggaagtagggagactcggtctgtatcattcccataaccagattcttggcaccagaaaactggtactggtagaagacgctgtgttctgaggctgttccgtacatccaagtaggtccctggctctcaaccagaataccgcgagccacataaatgtcgacttgatcttgggtaaccttatcaaggtcatggtccgcaacccaggcccagaggttctctatataagccgaagcagattttgtgacatggagcagaagtgatgcagcgatacaatccttgttcagggatgatgcctttttggagcatttatcggattggagcttagaaccgatcgcaccgcccacgcggaagtgacaatctgtttttgttagttatctcatgcaaaaacataaatggtccgcgcagttggtattctcagtaaggaaaagactcaccccagagacctgcagagccctgtgtcgactcatgaacattccactccatgagtacggcaccagccgtgggcccagataccgtgaacatcatgttttgaatttcgagaataccggtatccccttctttgcccacttgcacagcgacgtggggattctcggcgtcttcaaatttgctgccagtcgccataatctgcggccaaacttgcccgataatgcgggagccaagaggaacatggagagtatctttaatgacataaactccgtaaggaaagtgaacaattgaagacatatttgcagcggcagagagtacactgttaagggccgctgtgtcatccgtgacaccgtcgcctttcgcaccataggccttgacatcgaaaacctggccacctcccaaatcaagatattgaggacggcggcgggcgaaaaagttagcggttcctttaacataagatttatcgctagtcagaattgatttgcggttcaaaacctgcaattgctcttgctgggcaaaatgaagtcctgtatcgtcatggtagagaccgaatccccacgaaggaacaagaacttcgtttcctccagctaggagaggctcggtgcgggtgtcggcaacaattgcatctttgacgttaaagaacccaacgttttgaagtaaaactgccgttgagttgtctgcgtatagcgatgtgcgaataccggtaggtgtgttggcgataatggcgtccaccaagatgtatgaaccgactgcctgaccagtgctttccaaacctcctgcctgatatagattagcaatgactcgtcttagatctgttgaacgggaacactcacaccaccagtcacaacaattccgctcccacatgactctatgacaacatcttgcattgtccacgcccagtcccaatggacctgaactgcggtcttgcaattcacgaaaacaagttgactggttgtaaactgttggttacccagataggcactataatccatgcataaatacatcagctttttctcattggcaatttgtgaactcgtacccgaagtttccacccacgaaggttaaattgctcatgaaaccgccacttccgttttccatgtagatgcccttgacagtcagtaaatggaatacttgaattatggaagcttacatacctgctgtgtgtttccggtcgcttgcgacatgtaaaactcgatattttcaagagttgttccttgggcaacttgccagtgaatggcacatacatacgcaccggggtctgtacgggtaatatccattttgaaattgcggacattgcgaaggaagttgtttgtgttcaagtaccttgatatggtgttagacaaattcgcacagttggggcttggtacttaccattgctcttggtcgccgacataaacgtcagaggtaatgacgcccaagccaacaaagctcgcagcagccaaaattgttggataattagtcggctaaatggtttggaatcagtggatggctcataataagagaacgaaaggttctaccatacatctcccaggaattgcgtgttgtaatactggatgatcggactgctgacgaggtatgttccaggaggaaagaataaaatagccgggaatattgtgcttgaaccacagtttgctccacatcgatttccactggagatagctttattgattgcggctttagagagtcgaacagttagttatatgctgagagtaattgacggcttctatcttaccagtgtcgtcggttacaccatcacccttggcaccatagtccttcacatttctccagacctggtaatagtaacattagctagatacaggtagaagtcagataaaggtgggttactttatatccagatggagcgaatggactggcagcattttgctgcagattggccaaccaataatcagaaccactcgcagctctctttacaagagtagaattttcggattgcaagtcagacgattgaagcacagtctgttcgtccgcaacataaccaaaaagcccatttggatgttgaagccgctggggaggtcggttggtatcgtttgtcttggacctgtacttagcatgcaccttggcagccagagcctcctcctcgccggtggaagcggtgggtcgaacagactctgctaaggctcttgctgcatcggcgagatccttaggaattgtgtaggcaaagctatcattggtgttggtgctttcttggcgtttttccttggacaattcagactcagacgcattttgaagggcggagagcctagtgacagctccccttgaataatccaagggtggtgcgtttattctttctccagtcacatcctttgcgttggccatggaatatctgttgaattttacattgtcaactcttaacttgttgacaacggccaatgctctcagagcctcggaaaccttggtggcggcatcagagttcccaaattgagaggaactcgacgcagcagcagaagaacttgatacagtgaccgagacagaggcgacattctgacgattgaagtgctggtgtaggtgttcatgagaatggtgggcatgaattgcccatataccagtgatctgacagataagcagtagccatcgtagaacaaaaatcacccccgccatcttgcaaataaaaaggcttgaaattgtcactggatttggagagttccaggcagaggaactcctagagataaagaggcgggctttattggaaattgcatcccgaaggacttacaacgtatgtcgaatggtttcgttggaaacccgagttaatctccggccaattgcttggcggttacatcgtttctgatagtgtgataaaatccctcaaaatcgaggggatattaaacgatgccaagtgaaatgggccaaactggggaatgctgtatatatattatttccaccgctttagtttccgccttcgtattatacaaattaatacggagttcattccgcatattctcgacttaggacagcggtctaacctaattaaaagagctcatggctttcctattttcaacacgagtgccatttattatggtatcgctactgtaaaaagcacagccttcgaataatttcagccacatggtagcttcattgatctaatcacctgatctattaccataaagctattcagagatcatctgatctattgagaatcacctgatttactactcttttcccgactttattcttctatgaacctactattctcaactgcctattactactccatgaatatcgctccaattaatacttcataaagtagtgtaatactcagaattaaatactctttcttatggaattcatttcatatttcgaaaaaaaaaaacggattaggtgatcgatctctgaacagcttcatattttgacagaacagatgtattaataaggtaatctctgcatagctctgttgacaaggatgattgaattaattatgcgatctctaaatagcttcattgacaatatttgtattcatcagtcaacggtatgcttatttatggtaatatcaaggaggccgaataaattatagcagtattgtattgttccattagcagcgattctaccattctgcatggcagaaatcgcattccccatctcggctgcccatagtacggccaagtgcttgagcttcagatttcttggttctgggtcgattttccgccgggatggcccgaatcctgcggttcaaccggaaaccaagccgtcttctcctgggcaggtgcctagatacagaaaagaggcttgaaaatttgtggatgcagtgctatggtatcaaccgccaagccacccggacaatcactagttaagcctcgttgtttggctcactcccattttagacccttattggatatttggacttcgtattcggtcccttcgaattttataggcaccacaagtggggttttcaaaagcggcgatgtaacaacgactctactagcagaatctactccgtactttcaagcgaatttccacttttagcacatattgcaatcgtaggattcggatactcctcgaatcggactaggtgcaatttcccggtgtctcacctcaccatgcagtagttcaaagttatacccagcaattggcttctgataagtgtataagatgctaaatcattcccactatatttttcaggagctcaagccaattagccaagatgttgggaaaacatatgctgaggttaagcatactattatgtgtcttcgcactgctagtccttggacaggattgcagtgcaagcaagccttgtgctacaggatgctggtaagtgtagccttttgggaaatggaaaaagaaacaaccacgcatattctaactgttggttgttcccgttagttcgaagtctggcttttgcggaacaactccagaacactgtggtgacggatgtctggcgaattgtgattataaacttgggtgtgatgcaaacaacccctgcgaggaaggttgctggtaataattcctgactcccggtttgattggaatgatcaatgtttaatcgataatcagtaataaattcgggttctgcggacatggccccgacttttgtggcaagaatgtctgcgttgctggatgcgaacgcaaatcggaatgtgatcccggctttggaggagaatggtcagagagcaaatcgtgtcctctgaacgtgtgttgctcagatttcgtacgcggcccaactgacctctggatgttgtgaatgactgctgactcgaatatctccagggctactgcggaacaacaaaagaatttgtaaggaataacccgcatatctcgatatttgatgtactggctaacatctcttagtgtggcaacaaaaccgtcaaacacgaaacctgctctaaagatcgctatatggacagagtcgttggctactacgaaggatggtctagccggcgtccctgccatgccttctggccagaacaaattcctctcggcgtctatagtcacgtcaacttcgctttcgccactattgatccggatacttacaaagtgacgccgtcagaccatcgggatgttgatttatatagccggttgacatctctgaaaagttacgacaaggaccttaaggtcatgatcgccataggtggctggacattcaacgaccctggccgaactgcaacagttttctctgatatagcagcctcagaagcaaagcaagacaaattcattgcttcattgatctctttcatgtctacacatgattttgatggtatagatctggactgggaataccccgaagccgacgaccgtaacggaaagccagaagactttaagaatttcccaaagttcatggctaggctgaaaaacgaactgaaaaagacccctggacgaagcgaactctccatcacgctaccggcatcctactggtatctccagcacttcgacctcaaagagcttgctaagcatgtttcatttttcaacatcatgtcatacgatctgcacggcacctgggatcaagggaataaatggacgggtgcgttcctcaacgctcatacaaacttgacagaaatcaaatctgctttggagctgctttggcgcaatgatgtgaaaggagaccaggtcgtcatgggtctcgcattctatggccgttcatacacaacccaaggctgtgtagagcctggatgtgtgtatgcctccggaggtcttccagggccatgcagcaatgaggcaggcatccttctcaacaatgaaattatggatatcatccatgacagaaagctggtgccaaagctgtacaaagaggccacggtcaaggttgtcacttgggatgatcaatgggtctctatggatgatcgagagactctagccatgaaggccaattttgctcgtcagcaatgtctcagcgggttgatggtctgggcgatcagccatgacacttcaacggcagacttttcacgtgatctagcaatggtgtcaaaccgccaagtgttgatgcaacgagccgaaattgacaccgatatcatcacagaaaggaccaaccataagcaatgccactggaccaactgtggagatagctgtcccgcaggatggcaaatgatcaaacgcgaagacgattggaagacaacgaatcctgaatacatgatagatgatacccactgcgagggacatggctcgcgctcctggtgttgtcctcctgacgccgaactcccaaagtgtggctggtataacttcaatagaggcaattgcaagcctggctgtgaggatggaatggttgagattggctcgacaacaaacggatgcaaaaaggaagatcaataccagtcggcatgttgctcagtggaagacgattatggaaatgggttgagcagcatggcagtctacaatacctgtgaatggtcgaaggagaatccccagtgtgacgatggcaagtgctctgggtcaaaaagcacaatccttggacagtccggtcaagggagcggtgatgtctactgttatgccggggacgtctggggcgatcattggccaaaaattcagcataccttacggaaatactgctgcaacacatcatctaagagcaaccgctttgagaactgcgaatggcgaaatgacgtgggtttgcattgggtcggccaaagttgcttctccggatgtgactccaatcaagtgcgcgtggcgatggacggctttaacgaaggctgctacaaatccggtgcccgagcatactgctgtgatgcagtcagttacacggagactgagcgcatgtctgatgacctgcaaaaattcaaagatgcactcattgactggacaatagctgtggaatgtacgaattattactactccgcaacaccagccaagtctctaagtattcgtgaggacgattgcgagatctttgcgtcacatatacttgttgcccacctggttgaaatcctcatgggttacgagtccaagcaaaccacccactggcagcgcttggtcaatatctggaacgatgtcgtaagtaaccagctcaagaatttgaacacccgcattatgcttccgttcgttttctcgaatacctcatttccagagctcctcgcaaacggttatcaaaccaccgccaaaaatatcctagatgttcccgattggtatgataaacgatttggaaacaaggattcggggataacatgctcgaagagcctgtgcgactatgaagatggattctgtgaccagaccgacgacgacgacgacgacgacgatatgtttacccgacgcgacctccaatggcaaaaggtttgtcaaatctccttaatgcatagatccaactaattttgaataggacaatggacctgtcctacagaagcgtgccagctccaagccgatggacttcatatgtattggtaaagccggcgtggaaagagttttggcgttcacccgatttgcttatcctggcccaaaggattggttacaactcaaggccaaaaagccagatccaaaaaaacaggtaacggtcaatgaagccgtcgactacaatgatgacaaggattgcggggacactgctatacaagaacgacaagcgacgactgcggagctcgaccctccaaaaggaaaaaaatctaggttcaacagtgagtgttcctggcgaacgaaaccttggtaaatcactagctaataatgatctagcggatcatctcctcgagatcaagttgattcccaagtttatgctatgggctattggggcggggaactgtcctgttgattgcgacttcttcatcgattacttcggcgaagatatcatccccaagactgcagaaaaaacaccaggaaacaatcttatcctccaaaagcctattgcgcgagtaatggagcaacttggaagcaaaaccaacttcgatgtgttccggttgatggactcagctttgaacgcagtaaaaggcgacgtaggtctctggtattttcaaccgaagaatagtgctgacttctttcgcctagctctggagttttgatcgcccacaaaacaccgcatttgatgatgccacatggctgccacttgtcgactctgatgacagctctaaagctttaaccttgctacgaagcgtaagctggcctgtatatctttgattccccggcttatttttccctgctgacctgttaccggctcgctgcaggtcttttccgtctataattatcaaaattcagaaaattttcagaaacgattcaatattgtctacaagaagattcgtggcgagttagatttggctgcaacagaatacttcaaactttctggaaaggcagttgaccttggggagtgctgggatcgctttttcaaaatccagaaggacttgatggtgagctttggaaggaaatttgttgagaaaggaatcgaagagttagctactcggtgggctaatgattcggacaaggagaaagctgaggtggttaaccaggtgctgaaacagttgagggagaagatggggcagatctatatgaatgatttcaaagcagagtatcaaccatcatggaagtgattttgcctgctcgtccaagctggtcggtatcgtcagcctgagcgtcaaatgctattgggtttagacatatgtgccaccagcgtttactttctttcacatatcggactatcccatctaacaattttatcgtgaattaagaagtctagggcattcctcattcacttgccaacctctcctagtctctagtaaaactctccgatcaaaatgattatcccattcgacggtttgtggcattatttacacccatgtgttacagcttatgaagaagatcgcacctaattcatccatgccatcaaaaaggcgtataagtggacggaaaaataccctttgacacacatcaacgccatttcttacatgtctcttagttttgcttgccgaagggggccaaggattggtgaacacggatggacaactgaaggtataaatagagctcgaaccctctaatccactctgcgcgcagctcctcagaatccctccacttgccatccatgcgattcccacccagcagccatactcggtgcaggaggtctacgtccagcccaaccatattgtcggggcaccgttaagtcttctattcgttgctatttacgaccgaccgccaagaccaggggaacatgatatccctctcaacgccagtggttttcttgaaatcactaagatgctattctgatatgctctattttgctattgggctcactacccatcttctctagatacttcttcgattttctgtgtatcgttaattggaatatttctacaaagaactgtacctctattgacctaaaatctattccatctattagggatctagtacgcatattatccttaatggtccgagctattatcacgttgagcttctcgaggtcgaagtagttcgtgaattggtttttttttgtctattgtgtgccaatagtgttttatagtacgaaaagtggatgtaatttaatagatacgtaattatctactactccgtagctaggaaataattggagcttttaaacgagagacctaattagtatgtccatacggagtactctgtttcttcgtgcgtgtaaaacatgcacgtaatcagtgtgctttgtagtggctaaggtggccgctcactatatcaataatggcggtttggccgagtggtctaaggcgattgactagaaatcaattccgttcgcgggcgcatgttcgaatcatgcagccgtcgtgctatttcgttttttaatattttattgacaatacatcatggaggacaccgctattccagtaccgccttcctaatcgggttctactcaggcgctaagcgatattcaaaatattcaagccgtggaagttcctggccaactaaatgcacccacttacaacaccattgcaagaaccattgccggaaccatgccctggaatccacgtcaacccagtatctttcacgatgagtcatggcctacaccatggcgttcatctgaattcccacccgaagaaacttttgtcgaacgaatcaatcgacagcatgcaaatcccgagtgggagtctgtaccgcacttcttatactacgagtctggtaggagtgggggttggccatggggatgggccatctatcgtacctcctatctcaacacttccgatcaagactggactagagctattgaaaagctcgacgaggcctgtatggctgacctggagttttacgagcgcagctggcaccgattcgacctcaaatgcgttgaaatggtccgcgagggttatcggaatgttatctttgaagaccccgcgttagagggcgcgtcggaagcggttatccaacgtcgacataaagaatgggtcgaaagccatggcctccgcatatctagtggcattcctcgccttggttacgcacttttgttagatgatcgctgtatacgatcaatcttggccagtgcggcgcctagaaagccatctgttatcgaacaggggctaccatggccaaagattaacgataaaccgggggggatggtcggttatgttaactttatcgactctttcttccgccccgaagacccggaaaatgactatggagagtactaccgtggattggtccgtgttcatttggactgtttagcccattttgctatctattgcgaggatcttgagactggagagcaggaatggggtgaatatgggatggacatacctgacaatgtattttatacagatggccattgctcaaagactgagttgaaagaaatgtttctttcttccccagatagaaacgttgacagaactgcgagtgtgactgagctcgagtatatcgagcgccaggatatggagaacttagcattgagtaatgtgccgggttctacctaacactggaatgacaccaataccaacggcttttttaatccctagataatccaacagttatcctctttcaaaaggtctttttggtcttttctaggatatgttagaacatgaccactaactacctccgaatattattagtagggaacctttgatacaagctatttctagacctttaagagactgcatacatatttgtataaatattgattcatggcagctgattaacctcccggcgaaaaacccggtgggcgcgatggacccaaaaacctccgtaaagagcaaactatgacaaatcagaataacatcctagtgatttcaagagaatcattggcgttgagaacgatatcgtgttcccctggtcctgggggtcgatcgtaaatagcaacgaatggaagacttgacggggccccgacaacgttgttggactgaacgtagacctcctgcaccgagtatggctgctgggtgggaatcgcccggatagcaagtgtaaggggggctagttgacatttttcaaaggtgacttcagtcaaccccatcgagataataataacaatgcgcactagaccccggggaatgataagccatctcttagcgtcttcgcgaagccgagggagggatttagaaacgcccattggggcagcgatctggtggtaagaacgcatggcctccctgtttacctataccggcggtagacttataggtagctgttccagtctagactatctctaaccacctgagtcccattgcaataagcttcctgtcggttgctcgaccgaattggtttgtgactgcgtcatggcgttctgataggaccactttgatcagccctttcgtcccctcctatcgaaaacgatattcaatacaccctagactagtcggatgctcttcgttgagatttttaattgctcgtgccgatagaatgaggacgacgataaactcattgccatctcccttctcttatagagaattcagtaactgctcagcttcgagccgtaggcctttgaagcctcggaaagtgtgtacaatagggtccgcgggaagggcggacataagggaagtgaaagatatgcccttctcttgtcttcatatatctgaggctggggcagaatcaacgtgagccatggtgattcggccaaccttggtgccttccataggacgtgattggagactttctgaagtttgatgacccgggccataaagaagttaatttacaatttatgagcaactgatcggccaaataaagctacaagtgaactactcaggcacttgaattaaacaaaaagtaaaagtgaactcaattgaaagagaaaattgggtatcgttcgcaaactcccgctaccatccgctaattcatgaagcggcgtcaaaaattgacgccgaagtgagcgaagattcaaatctgatggctttgtcagcataagaacataaacagaaggtttatagactcaccaatgcaagaggaatgcggtgaggaacccgaccattgtgcaacagcatagccacggccttctggggagtagcctgtagcttgcggtaggcctcccgaacgtgccgtggctcaatgggagtgcgcccctcctcgggcgggtcgaacaggccagtctcgcgcttccgcttcttgaggttctcaccggcctcggcgcccccgcgacggtgcttctcgttgtcttcgcgctccttgactttgagcgcctcctcagtcagggtctggacgatctcgaatgtgagaaatccgaggatgtccacaatgtcgtcgttcggcttggattcggtcacgatgccgaatcctgcccattcgcggaatcgcttactcttgcggtaggtaaaggaagcctggcggcactcggaccagaatacatactcttcccttgtcatgtggcgggtgcgttcatcggcggcggcaagacgctggagtgtcgcgtagttctgctcctcctcttcttcatcttcttcatcttcacgttcgggaacctgaaccgagtagaaactgttgacatcccacgcaagtccgaccttggcgcgcttattcttgggcttgggggcgacgtcttgggggcctgcaacaacaccagccgcatcgtcggcggcagcgaagtcggcggcgtcaccaccacccttgtcgtcggagtccttgacatttttgcggacgtccttccaggacaggaaggttcgcagacgggagactttagccctatcgtggcggatcaggaaaatcaggtcgtcggtagagatcgagcgaactccgcggcgggttgccaatgcagtgctgcgggtaagcttacttggtcattagtgacaagctttctagtttgaaattcccgatactcacgatttcgatcacctgttgacgcgtgatctcttcaattaaagtggtagtctcctgagccggctctgctgtttctccggagacaaacatcatctcaacatcgtcgttagtaaaggatttcccaaagttgtcttcgtccatctcatgatcttcctggctctcggtaattatttcggggctagttgcggcattgtcgattcgggaactgaacgaggtcaagatgcggctggaaatcgagagaagccgaatgctagacagcccttcctcagaaggaccacgcagcagcttggcaccgaagacgtcttcaacagaatgcatggaaatatcgtcgcggaaatccaagcccgagtctaaagctgcacaaggagcattgacgggggagtaaaccgtacaatcactcatggtaacatcgagatcatccatggtcccatcagaaacactcatggtcacatcagggtcagtcaaggccccatcaatatcactcgaggtcccatcataatcactcaaggacatattggaatcactcgaggccatgtcagaatcactcgaggtcccatcagaatcacttgaggccatatcaggatcagtcaaggtccgatcagaatcactcgaattagaatcactcgagatcccatcagaatcactccagatcccatcatgatcactaagttcttcgtcgctcgaaggatcttcccggctctgtgcccagagcgcattgattgatccgacatccaggttgggagaagacatgattggggaatcagaaaggatgaaatgtcaaaggatgcgtgagacgcgtttgttggtgggtttgacaaagtgtttagaagacaaaaccctcgaaagaggacgcaaggcagtagataatacgccgaaaatacaacgctgcaggggggcttctcttggtaaacgaagcgtatgaaccgtagatagaaaatatgaggagtgacagctggcggggaatggtgaacgagaataagcgagacaggcaagtcggtaagccgataggcagagtagcagccctcacaaggtcacaaggtcggtatcgataaacagctcttgcttgtgctcgtgctcgtaaaccccacaactccgtggatatatgagagaaggcacgaccatcctgccaattatcctaggcctaggaaccttgagatcgatcttggttttcaacacagtatccttcagcgatctaacgtcaaagcttcgaaattggcagtaccagtttcaaaggaccagacatctcgagtgttgaagttctgtttctcgacgtcaagatgtgcgtatttcaacaacccaacaatgtaagtctgaaaggcccagctagaccatgacaggacatcaaacgggtttttagatccaatattgaccctcgctattgatcggagaggacaagaatgagatgtcgttattccagcaaatgagtacattcgcaaaccagtgatatgttgcaagtccagccggaccgtctgtagacatcatgattgccaacctgaaaggcaggttcgaacttcgcaggacttcttcctatcggactcggggaatcgaggtggccccggccctatcctcagagactatgtgtttgcgccacgcaagtatgctatgtcgcaaaggcagtcgacagtcacaatatgtttagaggccttcgaagcctgatcgggcaataagatcgatatattcgagagccagaaagatcgggagatggaaaaacctcagcaagatgaaccagatatcagggactcacctgttgtatctcctgccgatacttcgggtttcgatcggagctcatgatgggtggtggtaaccctaccaaagagaatttcttcgattatcaagatgagggttacactagtattctagcgtgagtgaatgttcttcgattgattgaagacaagtgagagatgaagaggagatgaagctctggacgttcacacaagcacagggcgatctggggacgataagcgataaccggatgttctttgatccggcatcttttatccggcggtggcggagtattctgccggcatgcggggcacggctgtttttttacctaactgcttgttatacagtgagattcattgtattctgctcaattgcatagcctgagatcttattgtcaggatgctctatctagttggactcggcctcgccgatgagacggatatcaccgtccgcggtctagagatcgtcaagcgggccgagagagtctatctagaggcttacacgagtattcttcttgtcgataaggaaaaattggtgagttgagctccaagtctttactttgaatcccatatgccaatgagtcaatctatatctttcgcgcagatggactgattaaacataataccagtaggaagcgttttatggccgttccgtcatcgaggcagaccgtgaactagtcgagactggcagtaatgacatcctcgccggcggcgacaaagccgatattgtgttcctggtagtgggagacccattcgggtacggtcttgatacatctcccctacaagatctctagctaaaacataccaccaacagcgcaacaacgcatactgaccttgtcctccgcgcgcgcgaacttggaatcgagaccagagtcgtcccgaacgcctccatcatgtccggaattggctgcacggggctccagctgtacaacttcggacaaacagtcagcatggttttcttcaccgagacctggaagccgtcatcgtactacgatcgtgtgcgcgagaacgtgcagaccggcctacacacactagtcctgctcgatattaaagtcaaggagcagtcactggagaatatggcgcgcggacgccgcattttcgagcccccgcgctacatgactgttgcacaatgtgcggcacaaatgttggagacggaggaggagcggaaggagggtgtctatgggccggatagtttggctgttggtgcggcgcgtgttggtgctgctaatcagaagcttgtttctggtacgcttaaggaattgtctactgttgagatgggcgcgccgttgcacagtcttgttcttcttggtcggaggacgcacgatcttgagagggactatattcgcgaatatgcggtcaataaggagacttttgatgcgagctatgtcaagggatatggggctagcttgtaagttacttctgtggagatatgagaatattaaaatacatgataagatccttttaaaatgtggactgatttacttgatataatacaccgaggttgttgaaggacaaaggttggaaagattgtatatggtatattggccttcattcaatttgatcctgcgaggaccagccgaccagagcagtgtctggatttttctattttaaaataggaagacaaatgaaaatgccgcaatataacgaaagatgcaaagcaaatggtatccaagaaacaaaaacgaaaaacagatgcgaggcataatatcaaaaagaccccaaccgacaccttatatgcaaaatgttgaagcaatgtacaactcaactctcgagaaaaaagacaggcttatatcgtatcacatcagatgtcttcttcctcaccaggaagaagaatctcatgtccagaaccttcatatacaaagatagccgcaagacagccaaacacggatactaaggcaatcatccaccaggcgaagccgatcatgccaatatccagaccatatccgtaccacgcgcctgaaaatataggtccaatggtacggaaggctgacgatacggactggccaattccgtgaattgtgccgaggacggatgggtgtggcgagcaattattcaacaggataatagaggtgggaagagtaaaggttcgggcagtgacctggaagaagaggacgatgatgatccagaaccagacccaggggccgttggcttggccaggagggggagttgtagacggagccagtgagatatagggagcaatgaagtatgcgatcgggaagagggcgaggaaatactggtagctcttggctgctcccagacggccattgatagtaggatatatggtgaattggaggaccataccaattacacccaaaatggcggtcgcaaagccaacgctctgcggcagcatgcccagtccgccggtgaaggcgaatggcaagctccgtgcggggctcgcggggtcattggaatcatagcggggggtagataagaagagtagccagaggttgttgaaggcacccatctggaagtcgaagaaagcctgtgcgcccagtgtgcacaacacgttcttggtccagattcttcggaaaggcagggcacgttggagacgggcaggcttgtgcgctttttcttcgagctcgtagctttctgagcgatccgtgggccggtctagcaaaggcccgtcctcttcgtagtcgccgtgcggaagccttgtgtataaggatgatgaagaggggaccactctcctcacgccgcgcgcaaacatcttcttcgcaaatgcacccaggccaggcttgcccttgcaagatgccaaggtctcttctaatccatacgcaaccaaagctgcagttgaagagaggaaacagaagtttgcgaacattggcagggcgtacgggtacgtctcgagccattgcactccgttcgcacctccaaaggaagaattgggcccaaaaagacgagggtagctcttaacgggatcagccaacatgccacccatcactgcgaaactggttagcaaattgtcgcatggccgcgaacagcattgacagaatgaggtactcaccaggaccaaataacgaagctatgttgaacccaataggcaaaatcaagaaagcgcgtgagtgatatttcttctccttgacattctccgcgatcatagttcgaatgataccaacggtgccgttgatgccgccaccaaacgagcgccagaacacggcctgcgcgaacgacgtcgaataggcgacacccaaacaagacatagcagtgccaatcagaccaacaagcagaacaaactttcggccgccccactcagcatcggcaacacgaccccaagggatcgccgtcgcaaactgagcagcggtaaaagcaccctggagaattcccgcctgggtcgcaacatccgagtcggagaggttcgggtcaaaggacttgagctgatagaacatataggcctgcagcgaagcgatctgcaagaagtcaaagacacggcagagccccaacaacgccaattgaccctttcgcggcagcgacatccatgttacgagcgcagggcgcgctggcgcggacacagtcgggagctcattctcctgcacggtcagtacctgtggcaggccatggctgatagagcggccgcgcacatgctgtgcttttcgatcaccatttaaatccatcgaggtattccttagcatgttatcatcgaagacgggcgagtcgagcgagtcgtgggaggaatattcttcaacgctggcgagggaggtattggactcgcgtcggcggcggcctgtggtgttttcgggttccccggtgccctgggtgaaatggaagccactcgaccaggatgtcgtacgcgcgtggcgggcattattcgttttatgatttccagtcctagtcattgaggaatgcactagtgtaaagcgcggcgccgtaacgatcaaaggcctcggttccacgtatttttcgtggtttgggttccgtagttgttgatattaattatgattggctatgatagagagaatggaaagaagagaaaactggaagacttgtatttttttattttacttcgatttctcctatgttattgcgatgacgttttttctcggttcctaattgaggcccaccagccggagaatgccgttacaactttgtacacaataaagaactttatttttatattgaacataacatttaaatcaaatcccttaatataaaatccataagttgtatgatagatcgacaacgacgggcttgcgacgaccgctccacacctccctgccgattgacgacggaagtcttggcgttaaggaggagaacgttttgaacagttagttgctttacagtactttacaatacatcaatacaaaaaaacaattaataaccgtggtcctaccgcggttctaccatggtacaggatagagttcaagcgtatcagccacatccacgtttgtggagccgctttgatacaccacgtacaggtgatacaaatgtatacttcagtcctgccacagcatacttaaccctacaaggcgaagctaggagttgataacctatatacattgtatcccacgccacatacatgtatgtactagccaaattaacaatcctaacaaggtcgtattgtatctctacaaagcagtcgtattcggatcaatgcccagcgcgaaaccaactccgcctccctccggaggtatacgtatacccaggtgcgtagtatgtaactacaataaatgaattagtcatcccgccttcttccaaccttggttgaagtcccgatctcgggaggggcgcagggaagtgccacgcccgctcggtgactccatccttgtggataactcacggacattgcgaagtcttgatgcttggactccttctatagctccgtatactgtttcaagcgatattcaattcagtgtatgctttatcagtgcatcactcgttcctctcattcgttttactaaaaaaaggactcgacacataaaacggccgttctacaggcgtctcatcatgatcactctctccactcctcttggggcccaaaagcgactgcattcgcgcccgaaacatctcattctgagccaacttaccaacaggttttactatatcccattccctatccataaaccttgcatcgggctccccttcatacgtcgactccggaccatctatccacgtcgttccctcctgaaaacacgcgtctttcatttcctccgaactcctattgatcatactcttccagaatcccccttccccagaagaaacaacaccagcatgctcaagcatttcaacagtgccagcgacccagtcttggcaattcccaaccccgaactcggggatatttgactcgtcgttcccaaattccgagagcaggctagcagcttgttggctctgctcagaagagagggaagcaaactcgtagcgacctttcaaaatcgggtcttccagtggctgtgtccgcggatcgtagatgaagtcttcgtcggtggggttgcgtatatggtgcatttcgcaggtggaggagccgtgcttgtagatggcgattcccatgtgggaggggccatcgctgagtttggcgtcgccgcggccgtagatgtttgctgaaaggccgtacatggaggataccatgattaacactggtagagtaaagggagtatgtagttgtcacatgtagttaaatgtccccttccccacaccgctccagatctacatccgcccgagagatcggcggtagttaggcaactccgatttattggtgataagagcctcatggcgtgccccggcgcgtattcaggtgtcaaagctgaaagaaatggaaatataaatagatatccttcgtacgctggttccattggtttagcatggacacctgggcatcaatattgaagtgactaggccccatggggccccgcacggctcaaaacatcaacaagctcgatatcactttctcccaagcaagaatacagtaaccattcgattctatatacggcatttaggtctttgatagacctacagtcgaaatttctgatgccaatttgaatgacagcctttcatcctccttttagtatgcctcatattgacaatgtttgtttcattggagaaaacaacttcgctggctagtcggtttcaggatgctcttccttcgattttgaaaaagtcccgccatactgagatatggggtgttgatttgaagcacgcggaatggcaggtgctggaggtggtcttagaaaaggtactctgattatgggcgcactagcacaccgagatttgtcactaaatcataaatagttcctcagatgccattccgcaatccttgcacttcaactctctagagcaagtgcctcactcgagaagactttagaatggagaagcctctctgacccgagagctctccttactgaagcagagactatccttcctgacttggatctatgccatattactttgaatgagggtcaatatgtgctgtggattaatattgacgagatggcgattaagagatactcaataatacacgcaagcctgacgacatctggattcttggtgcagttgggtcttgctgtaatgcaaaagctctccgtgcttctgatgcatgcagccgctagttctgatctacatgactattcggcttcctgtgtggttgaatttaagatacatgccattcaaaacaccaagagaggacagcagtccttccaggggaagatcagcaatgccattgaggaattggtgacattcattcggtgtcactatcctaagattctgggaaaggcatacatcatcaaacctcgtgatgaataccttgcaactcttgatatcaatgaatctctattgagagatacggtacttttggaaaatccagaggaccttgctcgatatcttggctcacaactcccacctcgatatggcggtactggggaatcgctcgcggaatgtgacattcttcctagttgcagccttgcggaggatccaacagggaacaacgacctcaagacaccagataccagtgcggcagccagtactgacatggagaagaccggcgtgaaagaagaaactacagcttccgctatgaataccggcagcacttctccccatggcttgaaaatagaggagcaaaaacctcgcttaatttactccgacatcattgaaccgccatctatcatactcgaccccgaagacttgcccaaagcaaccaacctttgtcccgacaaaatgggcgcgcgtgttcttttcgcagattcagacacagttgcgaaattcagccatggtgtccgcctagctgaagccgaagcgttacacctagcatctacccgcacgaccatagcaacaccaaagcttctcagtgcatatatcctcgatggcgtcggatacataataatgtcatatgaagtgggcgaaccactcaacaaatactgggaccgtgttccgaaaaccgagcaagatcgcgtcctagagcagttacgggactgcgtgaaccagatgcgggagattcccggcgatttcatcggtggggttgacggatcaccttgtcgggatggcgtcttcgaggccggctacggcgactacactagctacagccacggcccgtacccatccgaggaaagctttgacgagggaatgattcaagctttgcgagatcgtatgccctttaaagtgctccagggtgaacatgacgtcgaatcgagctttttcaacagcgagtacatgctgtatcagacggtccgaggtatcaaaaatcacaagatcgtgtttacgcatggggacttgcatgccgggaatatacttgttcgggctgatggcactgttgttctattagactggggcctggctggtttctggccggagtattgggagttctaccgtgtcatccatcattcaccctggagaccctcgtgggatcgtatggtggagatattcatcccacctttttatgttgagtatagcgtcatgaagaggatattcgcgaccgcgtggaactaatgcagggaatagtccgctgctttttgagaattacatgaatataatactccgtacagaattattattgtaaaaatattaaattgaattaatatcaagaagtttctgccgagcgaacaccggcgcgaaaaaagccacttcgatacatcgccatacatcacgtacgatacaaacgtatacgcggccttccacctgcatactttaatcgatatagaggtggaatatataattctcatactacataagcctatagaagtagtcatatcgtgcttgtgctatatctgcaccagctaggctaaccacaaatacaacgaggtcgtattattcacaaagcaatcaatacgaaggaagaatacccatcgcgaaagtaagcagctccgcctcgatccggaggtacgtatgcccaatgcgtatgtacaataggtgcggatttttcggatacacgaattatattactcggtggaaacgtctacgggcccatcatagacttctagatctatatcatagatacacgatgtaacaggatttttttcctatttgggtggctgatacgagatataatgcgtatagcgatcagtctatggatatatgttatggtagtatgtatgtacagcgccgagtaactagctagcatctagaacgcaaaaaagaagcaagaaataaagatacaagaacgaggagtcactattcgatccgctctcgttcacgcctatggccgtatagactccgctcaacgagcgggaaataggaagttgtttcgtcctctccgacccatcgacgccaattccaccagcggaggtcggtggcttgcacaggcgggtgtttccgctcagccgtaccgtccacaggcgtagacgattcctgatcccgcagctgggtgagcgaatgtctggtataatatcgatgtgcgaggaagattccggcgaagagggggatcgccacgaggagaacggcaccccaggcaagtaggcctgtgaaaatgtcagttttgcttgtcttcctggaagaatagaaagcatgttcaggatatacttacggccattcctccaccggtctgagtactttggagttccagccgggcctgcatagcccgatggatgtgtataaatattggagcccgggttgttagggtcaatccatggcacggtattgacacctactggcggaatgaaaggacgagctgcctcttcgccggggaacccataccccggtgcgtccaagcaggtagattcggcgcaaaattcgcgcagctcggacgagggcacgaaggtatacttggtttcggactttccgagcaaaatgccctcgcgatccactgcctcgaccttagaccagaggtagaacttgggggtggagtatttggtctcgaagccggttttggaaacctcgtccagcaaggtccaaggtccagtggcgttcatcgctccccaaaatcgccaggtctggacgcgggttgcgccgttccaactaacatagaagctggtggtcgatgatgtctccgcgcttcgggagtatgtccatagggcaggagagtctgtcggtgcaccgtcccattcaaacttcattgcgcggtagttcatcacggtgtctttggcgaaagagccccagaacagtagattgcccgcctcgtcgtgctcggatacaaatgggttgtttccccatccgatgaacgcgttttggttggggagcatctgtaggtttccctggctggagctcactagatcgtctcggattggagcgtagtcgcggagctgggtagccgttttttccacgtggtcaatcatgatgatcatgcccgctgaataggtatgtgtcttgttgaagccgttgtagccattgttgtagagtgagagcagtgtatgcgtagcattctcatacaaccaccgggcgtcatgttgctgcgaaaagctaaaattgatattccggaaagagggctgcgcgccgtgaagccgccacatcaccgagccgtccttaccggaaaccttgtagatggccgaagtatgccgcgacgaaattaaatagtcgccggccgcatttttgtcgacagagttgatatggaagtaatcccacggttcatgcacattcaatcccgtcccagaagtatccgtatgagccggccatgtatagctcgaggatggatcgacatggtcgagagaccgccattcaaacagcacgtcgttggtctccacgtcgatctcctggaaaacactctccatgagccatcctacaccagttttgacgttccacggtgtcatgtcgaattgccgttgttggtaaatggtcatgagagcggtcttgccgtcattgatgggacggaattcgtgcatgtcgctcgaggccattcctccgcccggctgaactgatcgcacaacccggtagttgttatccatgatgattccatgtccgcggcagtatcccttttgctggttgccctggaagaaacataggtggtcggcgcctttatacttgcacacgtggagtccatgggcgtttcccggccctgaaatcccccaaccactccatactaattcctatgatcgattgatgggttagcttctccatgatggacgaatctgaaccccaagaacaaagacctacccctgtgttatcgtagatgtatgggccggggttttgaagttcatatggtgtgataaagatgtagcccgggctgagcttgtctggattggtcctctcgatattgaagacgggcgggtatatgtcgggtctctgttgtaccgatattagagagcaagcacactcgggtcaagctaatttcactaaccgatttgtaaaaagaggtatcctctcccagtgtacagtcaatcgcgcataaccagagaatgccaagaaagaatagcgacggcgcagtccctaaagaggaaaatagggaggtgcccatggatccttcgcaccacttcccgatgcaagatagaaacactgaagaatatcacccaaaaaaatatctgtaagggaggttatactgaaagcaaatcatttagaagcatagaagaatattccacccaggccaagaggcccaaggtgaacgaacagtgtgtacgaatccctctccacctgtcaatgcatgcttttcgcatatctagtggggcctaagttgtgttgatcgtcgacgttcattggtcaattgtcatttaaagctagacaaagatgcttagtcagcggcaatccggccatcgctgcccagtcaaagttgtctcagttgctgaagttgcgggggaagtctatacgagcggaatcaaggttaacaatccgctctgtgaacaggatattctccctcaaaaggcttgattgtctaactcggttgttgttttctttcccaaatacgtgtaacttagatagtgtgacggtacggtatctctcaggagccgcgtcatgggcgatgtggcagccgctaagcagcccctaataccataactccgagatcgtatctattccgtaagctgaatgtccgagagcaattataattcacgggtccgtcaaaggttcgtgaagaaccatgtaacgtgtctcggagatacgcagtcacccgccagccacactcagacagacagctcaatccggagacgagttaacctgttcgggagatgcaaccaatggatcgggcttctacgattccaggcgctccgatcgagctaaaagctaaaagccacgtgcatgtggcattatttgttgcgtacgccggtagattgaaagtgggggattggttcagggacggcggtggcgcatggtgcgtcgtcagagcatacgcgggctgttgttgcagcatctattctggtccgtacggcgtacacgtgcattggatttggacctacagtttggccttgtgcataatttagtgtccgtaattggaggtagacatcggacgatatggatactgtcgtaccagacaccatatgttgattgatttacgagcccgtgtgtgagattctccagggacatcttattttgcacgaagtagatcattcaacattaagagctacagcggatagataagacattagatgaaaagggatcttatactcctttcggcgtacccaccagagctaagaggacctatcaggtgtccacgaccacagctaagatacagacctttctttctctcatatgctgtgccaaacagggttcaaatccaagaacaccagtccaagcccgaatagtagtctcaaatatccaggcccggacgaactcctcaatcccaaaataacgagcaacgaacccatcagccactaagtccacgtataccactccgtctatattacgtacatccgtcaaagcttttaattcaagccttctaggggatccactccggcgcctagaatgaaagaagcaatctaagccccgcttgtttcgtatcgaatagagagaagcagttccacgttgtatcagatgattgtttcccttacaaggatataacaggagataacaatacgtgtaactttcaatgtttggaacgcaggttcacgtaattaatacccctttcgcccactgccaagccgctaaccagggaaactccacggcacttctccaataaggtgtggctggtacatttcctctggtttcgtacgagtacgaggtggaaggcttggggctgagtgtcgatggttgggtgtttatttatttgaagcggttgctatgtgtacatgcaagattgtcgttatgagcatacttctattctcaaggtttattgtatgtagcgaaacgtcaaagtattgattcgtatatatttcgcacgcttttgtcggtttgactttaataacaattcaatggcgccttgcatcgaccgattcatgaaaagtaaggcttcacgtagccaaaactctaggagccccttgcctctaggcaatgcatgatgataacagagcctcggggaagcgggtacttggtgtttatccctcgatttgaaagcgggggtgctatgatgcgcttgtacagagtatgcataagaaatgatggtagaaatagaaatatatactgttacattaccggattgttctccaaaacgcccctgtaaatggcaaaacaagagatcagagatgatagatgcatggtctgttccaacaagaaggatgacagagaaaaaaaaagccacggggtctgacgtactagcggcgcctgcgcgcactagcagccagcagagaaagtgagacgtggggaatatgagaaaaagaaaaaagatgcaagacaagaattttagcgaggggagaaacgcttgaaagccaaagtagcagcaaggccagcggcaagcagcgaaccaccaacagtgacggcctggagggcaacgttcatcatctggtgacggttgcgggtgctgcagcgcttgtagaagtcggccatgtcgttgccgcgggggaagggggtgtcaggaacctcctcctcgaggaactcgcagagcggggcccagccgtcgttgatgttgtattcgagcagacgctcggggggaaccaggctgcggacctgggcaacgtgatcctcgtagacttgcttgcccttgcccgggaagtcaccgcggaagaatgtctcaaagaacttgttcagcatagggtagtacatgccagcggcccagctgaagttcgacacgaacttgtgctctgggtctgagacacgccagaagacagtcttcatgacggagctgtggtttgttagtatcttgttcttagatcagaaacacagtgtataaaatgtgacttacgcatgccatgggtccacgtcacgggtagtcagaatgaccttcgcattgggataggcctcgatcagctccttcgcaaaggcacaggcaggccagtcacagacggcttggcagtcacccaggagctggtcccattctttgcggccgaactcgccgactccgtcgtacttcgcgttcagggcatcgtgccacatcaagcagtccggcgggttctcaacacttgcgcacatcatgtggtagcacttgccatagcccaggcgctcaaaagccttgcggagagctgtgaaataataattagtttgtatgttctgttcccatcggacccggtatatacactaatatacaccaagtccaacgcaacacagcacctcatacttacaggcagttccggtacggccaacacccagagccaggaccttcataggcacagtgcggtggcatttccggcggttaatgtttgtatcattggtgaagacgtcggtaatgggctggggagccagattatcggagagcatgagagacatggtgggtgtttatcagctcaatcgcaattcgatatagtttggaagtgtatagagacagaataagtagatgatataaacgaaagaagtaataaagccggacaaagaagggacaatatgtatggaaaaagtctagaaggaaggggggttataagagattgatatggagataaggggaagagtagaataaattaaaaaacaaaaattaaaaaaaagatcctaaaaaaagaatccagactccggaacaactgatcctcagggagatcgaatagaacaatgaagtgtactccgtagtgggcattcggcagtggcagtgccaatgacgaggctcaaaccatagtccctaagtacgatgtgtgtatgcctccccgcgagtggcaacgttcctatccgctatgtccgagtcttggctttgggtccttcattcctgatatccgattgtgccccgtttggaccggtggattccataaaaccaaagggcccacgagggtctacaaggtatgttgtacattgaaagtcattgtatgttgtattgcactgaggcgcgtatacaacatagacacgacgtcacaggctgacgcacagggatgtcacggatagtcaggggtgttttgtggagtcgtgtatggtattgtatgtattgtacagttcgtatggtaaaagtccgagtgcaaaaaaggccagggttttggtaaaatgaaaattaccaaaagaattgttccttcctgttgccaagactcatccacgtacgcttcgaaatccggaatattctttgatcagtcacgtcgctcggcaaaatcgacgatccatagtgccggttggtggagcactaaatgggaacgcgtacaccctcaacttcggcgagtgcggatttctgaatgaggccgtgaaggttcgaatgcaccacatacattgtaggctcatagatcatcgtagactcatctactatgtatgtataagcctgcaatgttgagttgctagttgtcatatcatacccagcacaccacagtggcagtgacccgaattgtgtctgccaagcttggcccacaatatcccaagcaagtcaatctctcagctgtcccgcccaggggaatatcgttccgagtacgagaacctggcacccccgctccatcgggttggttgcattgtattcggctcattcgagactgcagttgtgcgtttcacatgtcaagcgtaagtgaaagtttcaagtcgtctcctggatcgtccggtcactttgcctatcacggaaaagaccatctgctcgatgtgtcgccgtcccaaagctgttatctcccaagtaccgatcaggcaagttgccttggggtgttgaaaacaaagttccacccgattttcattgccagggataattgtccggtgtgtacggagtattgtgtgaggattcccggttctgttgtcacgcatcagtactgtcatagcggccgaactgatcgtcccgtgttgttgaggtattttccactcggggaaggtatcccctcgtggaccctggctttgtcgtgtgcccaacaaaattgagcagatgtctgtgaggcagttaagatgatatcatagtcagcctatgatggagagtgatagtgatagtgatgttccagagaaaccatcgtcatatacataatgcctataacatgcatgctaaaggcagattatggtagattctttgcggccagttgaagtaaaaacgcagaaagggaaaagaccctttcgaaagggtcaacagcgagagagcttcttaaatgtgctatgccaagacccttagactcacgctcgcaatcgaagctataatcacatcaccaagccacgaccgattgggaagcccctccacacagattacaatctaatctaagcttaaagccctaggttagttcattaagtcaattttgtgcaggccgtctccgtcaggcattaacggcagagttttcggcaaccagtgacacattgtattccaaactatgagtgggttcccttgaccgaaggacttggcagtagcagagagactgagctacccgtcacacctcatggatgttatatccacataagcttcgcatggatagttatgtctcagcttgagttatacgctagtagtagattagatcataatcagaaatacatactcactcgggacatcgtatgagaatatgagaatatgtgatctcgcatcttagctggcatctggatatgtttctgtggtcttgtatagcactataaagagcacatattcaactatgttcgattacattcagctcatagttccatagtgccgcttaatgtccaatactacatactccatagcccagctggcacgaggatagcgtgcgatacttctactttcgacgctggggtaccccatgcttccccacgattggtgtttttgccactttggtctttttttagtatgttctctgataaagaccgctttatttcatatattcggaggggaaaagaacctcatatactttgtctaaattgtgtaacccttgaagagtagcccctgcgtgttttgcatctaggaaacttaatgtatcctacccgaagaatatcctttgaaagatttcacccgcgatgagcagaaagaccagagaaaacttgatgcagcgtactcatatgaccatgatttcgacattggtccctaagtggtggcatgaactataccgatgatttgatatctccagaataaccccccaaatatgaacgtgaacagcactaatattgtctgaaagccaccgatacacctgaaactccatgcaaatgactgttttgctttgattgtccaatgcagtcgggtccgtaatcggcaacggtcctataccgtccccgaatccaagtatcacggctcgcttctactccaatttatccaggtgttccaatcgcgtgagaacaacctgcttgcttgtctcttgaatctcgcccgcgagaaagacttcgtccaggatagcgtagacctataaatccggcacacgtggtcagtatcacagctcatgcaactccgatctcacacatgccgagcagtgcattcgtcccggcgacttgcacgtaccttgtagaaattgaagaccaaatccagttcgcacacattgccgaagaactggtccagcacttcgacgaagaaatgaatggcctcgagataggctagctcgttgtcgttcgcatcgacgcagacgcaaaagaacaagccggcatatcttcggtagacgaccttggtactccggcggaactcaacaaagttggactggtatttctgatctcggggggcgacgaggcgatggacctgaacggttgtcggttattagttggatgggaactcggagtaagtgcgggtgcgggtggtattgcaattgcgacgaacctcgcctttcagtttgactttctcttcatcctgtagcccagtgtcagctcaaagtcccaatttcataccgactgatggattctggcaacactcacactgtacggtgaataccatttcgccaggcgcgttttccccctataccgtcattagtgtcgaaattgaaaatgacccgcgcggacaccactcactggcgattctgaaccaggataaaggagaggaccattgttatagaaagccaggatgttacctggtcagcatttatgaaaccactcggagggagtgttgcgacaagctttggatggtctccgctgctcccgttatcgaagctcccctctcatcttgcccggactcaccgcctagatggattctatcaggtgaaagcagggcatggagaattacagcagactattctactaatcctcaagcaatttagttcccataagacattcaatgcatcaactcaactagtataacaatatttgcaaaacatagagtatcaacagacataaagcgtagaattcgttaacagctcccatgacagcccggtgtaacatgtgacaatgagtgacactgcacagtgacggaataagatattctggtttgccatgttccatagcgcccagcagccctcaccccgagctcattcgattgaaaaacctcgtcagacgagtctagaaatactccattagcaaccaagtaatgtagcagtaagaccaagagcaagtccacgaaagaaaaaaaccacataccgtatagctctgtggcctaggaggctctttcggactacccttctgactctgcgcttggctctgagcctgaccctgagcctgactctggcgccgagtctggttctcatcctcagactcatcttcagacccgtaatcctcctccgaatcaggataccaccgttccggatccccattgtagacaagataccagccgattttctcaccgggggcgaggcgatcgcgcaattcctccagtgccgccatctggtcgtccgtcaacccagagccctgttccacgcaatcgatattctctccggcgccaccaccacccccgtcctccggcatctccagaacccgcgttgaaatatacgcatggtcctggctgacggtgccactcgtctcgtcggccgggtcatactgctcgataaacgacagctccggcagccgggtcaccaggtccgcctgtgttttgtggaaggattctgcgataagttcggtcgtcagcggttgctggatgtattccgctgctgcttcttctaggttgtggagtacgatgtatacgcggatccccgtgaacccggcgcggggccagcggaagccgtggagcatatagactggcatgatatccgggtcttttcttgggagccttgtttcggggttcgggagggttatcgcggtatctagcgaccgctagctggggaggattgtcagatttgcaggggattcggagttcatattaagtctgtgtcatggcgggtggtctatcgacgcgattgggttttgcgggtcccgtgcgtttcaacgggagttccgatttgtactgctttaatgcctccaatgaatgcgtgggattcgagattaaatctatgctcgtgtttcattggattttaggtgataaccccgaaacccacaggtctggagaagatcgtgccttgcttctatcacgtgtcatattattagttggcagtagaggctcttggatgctctctattatacccaattactgcattcacaaagcagaatgtgctattccaattattctctcggattcgtttttctctcaatgttggaaatacgaactcccaacctccgagttccgcagaatatgacaggtcatattcggggaaccgcttgatctaatttaaaatctgtgacttgtcgagccagtcaattgcagtcaaagcgaatcgttaaaataggacatttgattcattatgcagggctagaatcaaaacgttcgacctagcgaagccctgtctaaggcactgaaaaggaaaccgacatgaaaaatggctaaaatcaagacgctgagtgccgagttctggtgaatatcgagatagctcctcaatcatggtctcctcttcaaatccgcaaatctccgtgtcaattcatccagctcgggtatcccactgttgttactattgctcttggaggcaccgtcctcccttgagacagcagcggcttttccctctgtgccgggaagcttgactctgggattgggattgtctgtcctgggagctggcggcgcaacgctgacaggacttcggcccgcagtgagtccacgtggaggcgtagctttggtcaattcactggtctccgaggcacgtctcgcttcagccaagttcggcctcagcgcggagtccccttgctgcttgccaggagtttgcggtaattggggttcctctgcatcaccatcgtcaccatcaccaaggtcatcaacaaattctggcggcgcacttcccaactcttcttctgccccatgccactcaacgtggtacgctttcgcaatctctcgaaggtaactctcaacaagatcccgtcctggtgggcgcacacgcaagcccttgagaagccggtccggaaccttgacagtatcgatcttattatcttgcgctagagtcataaactccttgccgtatcgctcgcccagcatagtacgaagcatagtgaattcgcgcacctcgtgcgggaagcgatgccacgcgtagaataccacagtagcagcctcgtcaagcgcagtatcgaggtaggggttatcgtcatccgcaagcccatcaccagagtcatccgccggactaccagatcctgtgataggcgcagcccgctcagcctccttcttttgcgctcctccacccagccaagagaacccgaatatcgagccagtgctttccccagcgcccttgacgcctgcagtggttgataccgtagcaccggcttgttcttgggtgcgcttcttgagcaattccttggcgcgaagtctggcgcgggtcccttggtcgctgaaggccatctgatccaacacgtttgcgcgcgcaagcagcaactcacagtagagctcgaccatctccattacctctactgcgatatccgttgcaatgacattttcgactcggatgcgcgctgatgcatcgcggccttcgctgaggagctgggagagttcacggcgttggacgactgaggaggctgtatctttcttctgtaggagacggagacgaggaataagcaggcggagggtggaaactagtctggtctttgattccattgtgtcagttatttggtttctgtcagacgcgcttaggagttgcagcaggcaggcgttatatgggcagtgcggggtagtcttgggagctctaggtagcgatattttggggaagtgccccggccatgaaatgcatatgcgaaagaagaagaaaagtaagtgagatcatgatgacttactgtttgcgccgagggaggcattttggcgtggtaacttgttgaagagaagatgaggggggaaatggagcccgatggggccgagagaccttggggtcaccactactccatcgggttaccctttgttttctcacagtcgaaacttgaagaatccaccaaattaaaccaatgcaatataacctgttaattaggcatttgatgtgttctcggtgtttcaaggagttctgggaggtccgcccactcccaaggtcagcctcggcttgacctacagttctaccgcaaaagttgtacaaagttgcctacatagttcattcaacttgacaacatgtggctggttccccaattcctgaaaaacctctggtgtaggggttcaaacgaatatcctgtctttcccccgccagagcccgaagaactcctcgctcgccctaatgtctaccgcgaacgcctcttccaacgcatctatcgaactcctaaagacaagctggaagacaccccactgttttcactataccgactctatgagagcttggttttgaacgacaacatcggcctgcgaaacgaattcgaatatttctggtacgcgaagtggccggtcgtttctattcctgatccacaggacccctccaaatctcgctacgcggttctttctgctatcccagcctttttagtcgagtcatttaaccagcgtatcgagctgggtctcccacggaaagccgaccccatcatgtcccgcgaagaaatggagcagtaccaaaaggaggacaggatattcgagtcagcgccagagtggacggaccaggtggcgcggctcgaagataccctagtcattccacatgataacgaagagattcttgggtcgttcaatgataaaagggctagtgagcagctggcagcaaaaaacatcttgcattggcaaccacatattcatctcatttgaaggttgaacatgttggcctatgatttccgatgagttatgacgcgatgaattgttactctcatatatatttcgcttagtgaaaatcgataacaattgcacttttgtcctcgcttctcaacacacttggtgcaacggcggcattggcgacgagtgtttcttgcggtggctcagtgtttctccctatagtgatcttgctccatatggtctgtttgagagcccgaactatatcgtaactttcccatcgcatctgtagcccatttacaacgtccttgattccatcgtgctggatgacagcaacaccgaatgccccatggatatgtccacagacaaccatcttgggctttactctttgtatctcacgcaatagatacccatcccctttaaccttgatctttccatccggtcccttttcgctatcgcagtcaccatatagagctggagggccatgcaccaccagaatatcagtattatcggggatctgcccggtccgcacgtcacggattgaaggatactgaaaggcccaaaggccaaactccggcgtcattggagatccataaattttcacccggcgcacttgctgctccccggcagcgggcactggtatttccagcgtcactgcttcttcttgcaaataatgaatccccgtccaatccaattcctttcgcttcacagcactaattccctcgcgcgaaagaaacttcatctcgcttgcttcatcgaggataagatcatggtttcccgcgatgacaatcttatgggtgtgtggctgagaagacagccagtggagctgtgtttgcacctcgtcaaatgtgccatgggccgttaagtcacccgcgtggactagtatatctccgggtggcagaggaggggttgcattgtgcgtgtctgatatgcatattatgcggattggagggtgacttgggttatttggaagaggaattggtgttgtcgatggtttttgtcgtgcagactgcgtggctcctcggaataagatatcccagaggggctgtactaaacgctccagccatattggtggtcatgataagttgtatgggaagggaagtagatggttgttcatttggagttttcctccaactaaccccctacaacgttgaccaaatgagggggataattaatgattctaaagttccccgtgtcacgcgcggcgcatgtgaactaactagttacgtcatcgtatcagaagggcgaactgtaactatagaatatctattgtgagaacagcataattctcttgagcacatcgatgttcctaaagatagattgagggttggatcacgtctatcgtagaaaagacacctaaatattcacgaacccgacaagggagcatagaccaatcaagaggagatacatcatgaaacgcttatagtaccatatccctcttctcaccatcatcctaagtctaggctgatcacaagacagattaggaagagtagaaagcgaagcttctagagaaattgaagtggcgaagagagagacgataagggtatagatccgattagagtaggataggtagacgatgctcctttgattgatattgataatcattctgagcctattttgccaaataatggcacctgggtacggcccccaggcaggaagttgggcagtggagaacataaaagaatgaggcacctaatgcggctggtgtaacccatggggtatctaccacaagcttcaattgatggtaaagaaggttccttgatgcttgattctaccgatcaatgtctgctcaaaactgacgattcaatcggaggccatcataatcaagcaagcctcatatagaagtcaaaacaattatacttttatacactttattatgtgtgtcattctgtgcctgtggtctgtgattcttattcttcttagatcttagatcttagatatattatagagcgatttaggttatattcaatgtttagtatattatatcagaagacagtcacgacccaaacgaccaatatcaaatatccaccgcgacgatatctccaagccttcttcctggtcccaataatctttcataatctttgctgcattgacaacattcaaacatctcgtagcagtccaaaacttctctaacgattcaaccaggaagtctttctgggcgcgagaccgacattccaagcccgccacgaagatagcccacagaatacatttgaaaagcgcctcgtcatctttcaaaatatcaatcagacccaacagctcaaagactaaatcgtcctgcactgtgattgtttccgtcagtacatccagaatgcgtctcccatatatcaaagccccggttttgaaagcctgcgataatgtgcagagataattgattctttctggggcagactgtcgcagactcgaagcccaggcgtaactgtcaaagttttggatgagctccagcatcgcggtggtgtcttggatatgtgtttggagagcggcaccgtccggcagctgttctgcgatggcgtccctttccttggagagatattgtatcgccgacaacaggaactctggacatccaaggaaagattgctcgattttttcctgggattgcctttctgcttggccgttaaatatgaattctgacagtagttttggtcgtaaaaatgttgccccgagcgtctcgattctattttgtaatcagtcagtctctcgcatggctttataccactaggcctaatctaactcacaaatgaatctgattggagataaacccccggatctcctgtaccgtctgtccaggtccatcattgactccagcttgccactccagtagcggctggtaggatgtaatcaaactcttagcaccctcaagatggaaattccaaccttcactcccagattcgaggagatccagaaaaataaaaagaaatattctagcgacggttgtgtcgccttttcctattgttccgtcaccaagtacctgagagagagcttccatggcttggtgtttgaaaagtagcgcatcgcgattggcattaacgaggccaggagatgtaggaggttgatcttgatggaacgactggcctgtattagcatggtgccgcgccgcgagagcaagtatgcccttctgtaagaccgggtcgttcaatccaaaggagagcaagctccggaatggattcctggcgctgtcgtatacaatgaacaatttgcatatgtgtctgttatctaaatgcgatgtcagctattagtaccctagtgttagctgtttgcatgcggatcttacagtagtctatataatatttcgaagtttgatccaggcttgacatatgcggatcttgcaaggcagccggcagcatactaccttggaccagcgggcggggcgatgtatttggtgtcgatagcgcggaatcgatagttctaggagtttgcacaggagatccatctgatccatctgatatactctcgtacgaatggccttgcatctttccgcgaatcgcaacacccttgacccacctcagaggtctcttatcgaagcactccaggtcggctctttcgcacttggtgcatggtgttccagactggtcgcattgaatgcggcggttgcgacatgtccaacatggatatggcatagggaatgtgcaatgtggggaagaagggtatcagatactcgagtcgggagatatgaagccctggagataagacttgctgactgagcggacccgtggaccggctatccatggatccatccaaccacatacctgtcgacggcaattcttcgccatcacgacaatgtgtttgaacttgggtcttccaatgtatcaagttcatgaattcagcgcatagtatatgtctgtcattcctgctctttaagaagacaaagagaaataccaacagcacagaaaaagagactaaagagatccttcaaacgtcaagaggatattagagacgatctatataaagtacctagacccactgagaggctagtcatccctcataagtggctattcctttatattatgcctatatgaatattggctttctcttccacaaaacccagtgtatatagaatggccccgctatgtcccctctaattgataatctaaacccctttgaaggccacattgaaccatatagtaatagaccgctgaatcgaattctgctagttcagagcaatatgtcgcaagactcccagagtatttattcacaccacaccacgacgtccaaagacagtggggcttaacaagattagcaacggagagaccgagccatctgagacatgtaagacctaagcaaacagacttgcagcaacccccgtcctctcatccctcgaattgctgcaaccaatgcgggtccgacggcgcgcagagagagacaccaggcaccgtcgagccaatcaagcaccgcacaagcgaaatcggacccaaaaaaagcgagagcaagccactataggaaattagacctagacaattgaggtccgtccatgagaagagagtaagttctccggtcaaaattcccaaggccgtatatttagaacatttagtcttttgattggtcgatccaccagtcattcagctacgctgattggcccgctcggttcctgacatcattggcgtgggagtctgtcgccgctatacctatttaggaagaatatcacaactgtatggtcgattttagcaatcccttcgcgtttcagtattgcttagccgtagatgtgaggctttagcgtgcagggtatgcttacttatataactggcagagtttgcccactgaatgtagtctactgtttcctatctcatcccacaagaggtacttcgaatcgaccaacacgaagaatctgacattgacaccttccaccttctttgactacagtatgcgcctatctactctcatattatgccccttatggccaataactaacgagacactttctcctctgcagcctcttcaaaccacaatgcctaccatcccacccacgatagagacaacaatgacacaaacatccacaatcgatagcgctacaagcttgctcaagcgtagcagcatgagcaaccccgacaaataccccctctacatcttcctcatcctcgccggatgtattgtaggaggagtcatcgggttcagcatatactccatgtactacggcctcgacgattcaggcacgttcaaggacgtgggctacgagcaacgaaaatacatgcgcgagaccaggcagcggactatgaacatgctagctgttgaggcgaggagacctgatatgattgttcccgtcggggaattggatgcttgaattgcttgggtctggcgtttggggatgtctacatgaggaagggcctctagtagttaggtatggatggtttggttcgatggatattatatgtaagcaactggcaattatgatgtatgcacccgctatatatatcggaataaagacaggttcaatgtttgtgtatattcaattaaccaagtattccaaggacagtgggatgcttgacccgaaaaatcaaagcgaggacgaacgatgagagagcgctctgtataatcagcaaagatctgtctgagatctttaccctagtggtaagtattgacgaataaagaaaatgaacactgtctttcaatgtgcaatcaaaaagacctggttggttccagcttcaacaagctgtcacatgtgatcaaaacaaaccccctgcataccagaagcaataagagtaatattcaacaagctgaaaaagaagagcaatgccgtggagcaaagggatataaaagtcatgaagcagagtaggaaaaaaagtccaacgttgagcgtcgtcaagaaagggcatccgagggatgacaagaatcgtaaaaatggagattatgtagaagaagaattaaaatgtgaaagaatcgaacaatagatgcccgcgggtttaccgcaggcagatatagtgcagaagaatgccccaaggcagtgtttgtacacacccgtacatatatgcaatattgtactctcaatatagccgaatcagtcagcgctgatttagaaattcacgacaatggccgcaagcgcaccgaatgccagggtcaccatggagacagtggcactggtagcaccgccagtggcggaggatggggacgcagcagcggcggcagcggccgtcatggaggccgctttgatatcagcagaaccagtcagaacgtgcggctggtacgtatagcttagtgtcaggctcgagttgggtaggcgcgcgctggggctagtggcgctcatgataggagttgtggtggagatggagctagcagtagaggtggagatagcagtggaggtggagctagtaggggtggagctagtagtagaggtggagctagaggtcgaagtgggagtcgaggtcgaagtcgacgtaggagtagaggtggaggtaggggtgggtgtggatgtgggtgtgggagtctcagtggtgctagtactagtgctggtcggagtaggagtgggagtcgaggtgctgatgctggagctgctagtggaggtaggagtgctggtggaaacctcgatggtctcagacgaggtgctgccgttaccctccttctcgaagacgataatgtgcgcggtctcgcccttagggatggtcacgacgcaaccggtggcgccgccagcgccagtgaagggctgaccgatcatctcgttgacatcgttgacagcagggtcgatcttgcagggcaggccgttgcagccatcaccctcacactcaatctcgataccgaattcaggcttgactttgcggaaaggcgtggtgggttccaagtagatggggttccaaccgatcttcaggaaggtgttgccattctcgtcggtgttggcccctgcggtatacggggaccagttaccgacggggttctcggaggtaccccagacacatccttcctccgcggtgacaccaggagcgttaatatagtactgggcagcagtggagcaccagtaggacatgccgggcacggccaggtcggccagctcatcaaccatggtggggataagcatggcctcatttccaggcaacacagtctggcagaaagagacagactttccagccttattgtgggccttgagaacaccagtggccgactcacagtagtcgcggttggggaagggtttctggattttgccatcctcgtcacagtacagaccacccctcatggacatggggtacgagtaggacgtcgcatcgggatcccactgcatagacacctggccgggagggcaagcgtaggggcagtagttgccaggtttgcagggctcgtcggggctcatagcccaaccggcgttttgctcttgcggggtgatctcaaccaggccagcatcggtggggaactcgcactgtccactcctcttttccaaaacaacatcacgagtctcgtggtgatggctgtggccatggctatgtttggcggcttcagcgctcgcaatgagggcgacaagcgccgctgcgcggaaggatgtgatctggaacttcattgcgttggggaaaagactcggcaaattgataatataaacgaatgtatgtatgaagcgagtggctaagtcaaacgagtgacaaaaagatacggccgatggccaagggcagacacagtgctcacagataatgaaggtcaagacaagcgaagggaaacagacggggaaagcaccaagaaaagggacacggcctctagggagtcccggctcaggtccacgagtgtgctaacctaataaggcgttagatctgggatgatgtgcgcgcaattccggtgcagagcagagcagccccgactttcataggcggctcgtccgtgattgaccataattcccataattgcgccctaaactggaaatatgggcgcagccttggacccccaaaatgctgtgcccctgaagcagactccactagtggacagccactagacacttagtgtcaggggcaatgatagcctgcagccaatgatgaacgccattaccccgatggttcctgcttggcagggggaagggccaataagctaagagatatgcattttgtggagttgtctctcgaactctttcaacggcaaaataaaagcaaaagataagtgttcaaatgaagaggtgaagaaaaggaggaaaaggcgtgcgcaacctttacctgagaaatcctgtcacatgacacctcaatatccacaacatacctgggtaactaaccaactaataaatgtggcatgagaaaaacccaaattaagtgaactcagactttaccgagtacatcgtacgttctgcacgagaagaagaaatatccaccgaaaccaatgaatgagttaatattcccaaaatgggaaatattgctcatttagcctagtacccgtcaatcccaatcaaacccaccatactacaccgttttaaacatgttgatcaacacaagtgggctctcttctctttgataggcatggaatcacatggccaagaaattcgaatccttagagcgtttgtcccggctgccaatgtgtcgctctgtggtttagacaaagcttgacctgggagagtatgggggttttcatggcaaagcaagcaattaacaagatcgccgctaagatcactttgatcaagggctccatgagacgctatgtccaagatccgccagagttgccagttgtaaagtgtgcattcactgcattgtgaggatgcccggtatcatccggaatatcaatgcaagaagcatggacctgattagtacgtgatgcaggtggatgtcggtatcttcgatggcttgggccaattatatcggattataaaagtcttccggttagttagttacgtcgtcaaagaccgagcgactcttctttgtacttcttcaaactgcgatttatatagcttagtacctagccctaagctgcggcgatccttgcggcgtctacaatcatctcctattgcaacgaatgctaagagtgaaaatcaagaacggcattgcgttgcgcatgataaacaggatgtcttttttgagtttgctgtaaggactgttgatgttcctcgcatggtgagtatccactcggcctatcacttggatttcgcggggccaagtgcatctgacaatatatgacagatcgcattgacacggccataccgttattttttttggtgtcttttgtgctgcttttcggaggatctttatactactttccaatggatttgggtgctaccattatgtggcttttataatgaaaaaaaaaaaacaggttcaacaatgccctagctattgcgacaatccaaataaatgaaagagtctagcaggtaactgccccagaaaatttctcagtcaccttttaatacaatccaggcttcctccttgtgtatagtcccatcgctgtagctaaatcttgcaatgcaactgaaagttaacctccctcattaaagcggcggcagcctaaataagaaagaagagggctacaacatacagcgatcccttattaagaatagaagaataactggtaattcgcccagtaggtttttctttcctccttggggattatttgaagctattcacactgctgacccaccttaacccccacccccacaataatcttatttctcttttacgtgtgtacatacagtcagactggagggaaggtatggaagatagaaaatgtaatttgctcttagatactgcatcgtgttggacagggctccttggcctaaagttattttggtttgtattttcagatatgcatcatgacctttcgttatagagctgcatcatcagacatcaaaaattcacaaacgaagctattcgccttgctgagcttgtaggtccttccacccagcaaaagccaagacatcatcacggtctctccatccccaagcaatgcaataatgccgtgcaagcaattgccactcctccatctcatccagcatctctagcccagcaactctttccttctcatcttcgttaacccacttcttccaaataaactcaatatcagcggcagcctggccatccccaaagccctgatcttggaagcggtctcgctgcgcctcaagcgatgcatacctagcgagagtcttgagctggatgccccgcgccgcaaggttcgacaccatcgtacgaccaaaggcatcattgggccgaataggctcataaagaatcaacccaagcggaggaacatttacccgcgcctcctgcaagatgtctccgggcccggatagtggatgcccatgaccaaaaaggcgttgcgtaaagaacgcaactacctgctccgcttcagtaggcgataggtagaccaaacagcactcggagatcagcaaagtcggcaatcccgtgtccacacctggcagtgctccagcagggtcactgcatgtcgacagcgaccgcagatcaaccgggtggacatggtacgagggcgaatggagcgcgtcccccgcctccgacacagtaattcgagtatccttttccgacgaagcctgcgacgagtcaatcccaagcgccctctgtagcaaaggcgccgatctaatcgcgcggatcttttccgctgtgttgacggcgaaatcgagctcgtggtaaacgaagtccggggtttggcgcgacgagagaagccggaagacgcgcgtgtcggacccggcacctagagatatgatctgtttcttgtgtgtattttccggtgagaacgggccgaggaaacgcgccacgagctggtcgatagctgttgtgcgggcgtaggttcctaatgcgcggggacgtgtccgggtcagccgtatgctctcttgtcatcgggaatagcgtagtttgaggggtcgggctcacctctgttgatgattggcaatctacgcgtcgccgacccggcaggtgtcaatgatgccgcgtacacatcctctagatagcctagctcgacggcgctgaggcgggacacgcttgcgtcattgtctgtgccttggacgatgcggtcttttccagaagggagtccagcttcttctgtgcgacttgtgccacggcctcggcctcggcctcgtcgtagagtgtttaggttgggaatatgggaggccatgaggaatggaggaagcttggagcttgagctttcgtggtggggtagctatccgggcgtggatgtcgcctcttaacttcatacccgatttctctctcccaatattaaatttccaacccagttccagaatttgtatcttcgtcgaatcattcttatcgcatcctcgctcctacgtcttgtttgatcgactcggtgactacaacccgttcaggtagaaagttgtaagattcaacttcttacgttcaacagcgaagaaaacgatattataacattgaacatctcggtccaacatttagtacaactgctccctactgccaataccaccgagttactacagagctacgtctgttcaactccccaagcacaacatccctggtagggctgccactaaatctacctatgccaacttactcttgacaaaggcaatagcctgtgcgccatactcagctccataaccctggtgggtcgcggcgttactcccgttgcagcagtacgggtctgtggagtcgcagtatgattgaatcttactagccgacgggcaaaagaagccagaaggacgtgcgtcaaactatgtcccaagagttagatgcaaggcttccaagttcagggggaatatagggcagtccatacacctccagcagcacaagttccaacatcatacgacaaccctgccacatacagcgggtcacccatgaagatggctgccttgaccatgttcacagcggacgttgacagctggaccgcgctgttggagtagccttggttggggacgccgccgccgcacaatgctgcgtccatgatttcaccaccctaaagcatcgtaagtacatagttggtctttcgttttgaatagccgaggaaatctaacccacctgggaatatccgaccagaacaagcttggtcgatggacactgggtgttataagagttcacagccgaggcgacggctgcaatgccctgggcaactgagttggagtagctcacgctgccgcaagacgattgtccaccgcatgcagggtagctgatggcctcggccgtagagcctggataggcattgagaaggccattgacaaccgtgatggacgagccgtatccgggagatacggtggtctcgcgtgcaccaaagatgtggacacccgggcaggagatacgtttctcaatttcaacctcaaccgggacagcgagggcgccgccggcgagtagggagaatgtcaagattttgggaatcatgatgtcaatggatatcaatcagaaaagtaaaataagcgatttgttaccttggatatgctcgggtttgcaaataggtttgatatccagactccggagaccacggttgctttatatagatctcgaatgtccccttggcaacagaaaccggaatatcattgtattttgccgtatagcaggccatcaagaaatgaatatgaccctttggaccgggcggggctttttgcctaatcgttgtctgattatgaaacctcatctgcattgtggcagtattgccaggttcagaatggaacaggagctacataattaggctgaataaaccggcggataggcctaaaaagacacaccattggatctgatgttggaaatgtgacccgcctgcatttaacttaagccagttctccgcgttatttcaggcaataaatcgtcagatctttctggggtatgcaacagggatcctcgctctgaccggtttggaacgagctatgattcttcacaaacatttcggcaaaaagggctatattcattcccaggggtataggcagatatagagacctgcagcattgacatcgaagatagtcagttcggcttcccaatcgggtatggctcgagacgtgcttgtttcattggtctcagctatagggtccagtgtgcagggcataaaggtacatgtctaagtggtccttttattcctgatggaatctgaaatactaaaagtaggatcatggaatacttttttcacggctatcggaccgaatctgaggaccgtggtctatctttgtcatgtcatgtctcttttctatgtacaagtgaacttaaacaaagtatctaaacataaacaaagttgtttcggcaaagaggacaagtgctctggttgctgctcttgaaccagcggaacagacagaccgagtggaaggtgttcttgcaagtggcacagcgcttgttcggtgtctgcatatctgttgagatgacagagtaacagatagcacactcgctctggcccttcagagcaccttggacgtttcgtcggaaggccagcaatccatcaactagattgccatttgcaaacataataactccctggatcgtcagcagccagctcttccatttcttctcatccacaagcacgcgactgcgaccgacaaccaacgcgggttgaagcgggtacgcgggtgggagagttatggaaatagcaactggaggcgactcttcatcgactggaatgctggcaatgatttcgcctgtcttcgaggaaatcttcacctccaatgcgcgttcttcgtctgcatcctgggtggcaatccaatcggccacgcttttgagtgcatcttcgacaacaaggggggatatctgggaacggtattagttatagttactcgtttagaagggtccaatatcaaaaatactcacatatttttctgaccaggcttccaccggacccttggtgcgtttcttagtgtcaatccaccaattcttggtcatgttggcagtgtatctcaggcaaagatagtacagatgtaccaggagccactgtgtctccttctcggcactctcggactcatctggctcaaatgatcgaatatcaagtttcgatgcatcgatcatctttccgtgagatttctgaaggaaatcaaacgtgaattccagcaatgggaggaggatattgttctctctgatgcttgccgtgtagtattcctgcacagggagcgactgatcggactgttagcaagtttattttacaatttatcgtaagagtcaaaacttacagcatttgagaagtggtcaaataccaccttccagctgagaaggtacgcccgcatactggtccacatcttgtcatctccgtaagcagcagagaccatttgcattgtcggaggctcaagcaataaagacacgagctcatcaggaaggctgactgcagtctttgataaggcaacatcaaaagataccttctcctgcacatgggggatatagtgatggagaagagtgtaagcagttcgctgaattgctcggctgtgtgcagttagaagatggaatgtttcactgacatcctccaatttgtcaacggggatagtgttaatcaggcgtcgtaataagtcaacagcaacatcccggggttgatggaatgtggttgaggaatctatattttgttagacatatcagtgatgagagaaacccgaagcgcttaccaaatgtgtcaatggtggaggccagggcattgaaaagaccggcctttcgatctgaccaagcatcttggacatcgtcattgctgtcactttccgagatagacttcaatcgtgcgaagagtctgaaagatgacaccagtaatggtagaccctcttcacctccgttggttccccgcaagacagaatttagaatgtccatgctttcttcccaatgagatccataaatttccccaagagctggaaggacaagggacaaggttttgatgacttcggatttcaaaccaagaaacattgagtcggattgcagacattcaatcaagttcttggtaaggaaaaccaatctttgtgtcggaatggtggagacaacatcttcttccccagacaatagaatgtttaacagaaccagcttccgcaatcctgcgcaaagttagtaccggtgctatatctgctaatgtgttatcagacacttaccaacttgggaaacatcctggggcttgagtccagtggaatcggcaactagctcattgcagattctgtttccgatgggatttgaaagtatggagcttcgcaacactgcaaaccacgatgccgagcggatgaggtttgctgttcgggcctccctgcagatcttcgcgacgtcctctgaagatttggaaatttgcaatgaatccgcaacagtcattatcttgacgaaggcttcgccgaccctatagtccaagggagatgtaccctttagttcctctagtctgatttcccagaactcggcaagcgaggaggaaacggtcttctcaggtgcgaagctgactggctcattgtcacgagtccagttaccgagcacctttcggccagcaaaaacaatatccatgtattcttcgcgctgatcagccagctcgagacctgagatgccgttgcaattctcaatgctcaaatcgtcatctatcagttgaattgctaatggcaagaaatggaacaaagtctctaggtcgccttggtccaaatgtttccatagctcagaagtagagagaaggttgatggtgtagattgccaggcggaacgcagaagagcgatggtctgaatcgcgaggaatggttggccataaagccttgaaggagtcagatagctctcgctggatcaagtgaacaacgcctcctaatggactggttatagcagtggaaggtcgaggtggaagttggagaaagggggtcagggatttctcccatgaatgacgagagggcagaatatccttcacgctaccagtggccgtaagacctggcagcagttcatttgcgatagcaagaagtgattcaatcctgaaccaaagttagcacaatgtcctacggaatatagtagcaatgaaggacccacgataatgattcttcatccacatgactgaatccatgttggagaatttcgatgcccgacttggcactcgtatcaccaataccagattccttcaatgatttcaacaacgcttccgccaagcttgctacctcttcagatggtgactctgtgaggaaaagtagctttcctgctaactttgacccatgagctccattttggaactcccgaaaggaagatggtgcagacttcccaatatgagagagcccatgcaaggtatcaaacactttatcttctgaagataatgcgtcgatcaaagataagaaaatctgatccatcaattcgccatgtgatgttttgttttgaagaactgcagtgatgataggccaatgagcatggcttccttggcaagctttgccaagagcccgcacaacaagtgagttgagcttgtctttctgctcaacatcattgaaatcgagagaagaaagtaagctttgaagtacgtgcacattagactgttctggctcgagggccaaggctcgctcaacgacgttctcgaaactgaatgcaaatccatcccactcccgacattctaagatgatcgagatcaatcgatcggcagatggtgaaagcaaaagctccggtgcatcattttgcacaaagctttgaaggtctcgggattttttcgcaacagatggcaggctgcgaacacattccagcaccgtgccggccgctccatatggtttcccattacgagtgcgcagtacttcgagacatccttcgagaagggaagtagttgttccttcaaagacttccgatacttgaggctcgacctcggtatctgagacccgtgagagaacagcagactccaagttcaagaggcgtttagattgggcacatattgagtcttgagattcacggaagtcctttgattgctctggggacgatagcttcacagcttctagcagtccatcggaaaggcatgtacacaatgattgcagttcctgggcttgctcggcggaagccagagtgaaaacataatccacacaaatcccttcggctaactcgtccggaagtgaccattgagtcagcttcgggtcaatttgcacatactgcaccaccaagggagacagtctctgtgtgatgaattcggatttttgctcctgggggaccaacgttgcaagccatgctcctatatgggtataggatttccatccgatggcaaggtttgaacgcggttcttctctcgagttgaggccttcttgcaaagcctcagtcaaggcaattgcactggtagaagtgattccatggtcagcagtggccttgtcagcacctgctagtacttcttgggggatgattcgaagcaattggtctaaattcgaccaaaagttagaatgtccgccctgggaccccttctgcatgtactggcgcaatcgcttcgaggcagatgatttcccagtgtagtcatcggtccatatttgaggtctcagcgaagataataaaaggagggactctgacaattcggcagccgatccgatttgcggtagagacaatgattttccaatgatggctgaactgagagtcttccagtcaatccatccaggctctcgagaaaccgcagttcggagcaggatgtatatggatcggcgaacatatggatcatcgtggtgacagagagcccacaaattcttgctggctaacaggttctcgatttcaggtaggttcttctgcaaatcttcatcggacgaattgcctagagacgttgaattgttagacagggaatactgcaagatagaaacgtttaatatacctagtacgcggttgaaaagcaaaagtgcagctcccgcaacacgggcatactttccttcagcgtcgtctctcttcactgtcctttcatcactcaatgtcaaggctgtttggtgaagaatgacatcatctacaaagtccaaaatggagctttggtagattttccacacgttgtttcttttttcttcggttgtgaagacttttgtgaacgattcaagggcggcacggtggaccggtcgatcattgtcgtagattcctgcgatccatgctccgatgattttgggtaaattgggcacgatccgcttcccaacaagaccagagattgttccttgtataggatgggcaagttgacgtacccggcgcgataaatcaatcgagagtctgggataaattctgacctggaagaaaacattgttattacttagtgtttgtatatggaagcaatctagacatacccatgcatctagaaacccgtcatctagtgttcccatcttctctttcaatgttgaaatatggtcgcgcagctcctctagagccttcaatcgtgtaatgtcatctttctttagtaagttcttgaatgcgataactagttgctgctccgtaatgcgagaaagatctggcggcactgcaatgtatgtgagagcggacgcctcctttccctcgccagagagaccaccagagaatcccccaaatgatccaaaggcactggcagcagcgcgactgctggaggcctgggatttgaactttctgctcatgtggggtatgaggtccgcgggataagcaactagtgggggaggacctcgaaattgaggatttggaaaggcttcggagagagcaaggcgctctgttttcgaattctgagtcagactgtgatttgaatgcctgtatcactcttccattgcgtcaagtaccttcaatatcggatctccaaaagatccgcgggaccaagatatccatcacgtgagtttgtgtcatcgctgtcccgaataggacaagcgcgtaggcggagccgcgaaagatgagcgcgagctctcttctcttctgattctttgccctcttgcgttttgcgtcggagcccagccaagatgaagttcttcattgagtatgttccctatatatgattctatccagtctccaagctgaccagtcagtgatcttccggtgctgtttccttatcctcgcatctaccccgaacaatatgcctatatgtgcgatctcaaaaagaccctcgacgcaggaggtcactgtgtgctggaaatgccctcgggaactggcaagacagtttcactattgtcgttgatcgtcgcataccaacagcactacccggagcaccgcaagctcatctactgctcccgaaccatgtcggagatcgagaaagctttggcggagttgaaggctttgatggaacatcgtgctaaggagctgggtcatgaggaggaatttcgtgcgctcggcctgaccagtcggaagaacctctgtctgcacccttcggtaaagagggagaagagcggtaccgtggttgatgccaggtgcagaagcttaacggccgggtttgtcaaggagaaaaaggagcgtggtgaagatgttgagctttgcgtataccatgaggtaggactttgttatttgcaatacaacattgaacgagctaacaggcctagaacctttacttactcgaaccacataacctcgtccccccgggtgttttcacattggatggactggcgagatacggtgaagagcacaaacaatgtccctacttttccgcccggcgtatggtaggatatcgagcgcgtattccaccaaaagtgtcccatttctgacaagctctaccagatgccgtggtgcaatattattatctattcctatcactatcttctcgatccgaaaatcgcggaacgagtatccaaagagctctcaaaagactgcatcgtggtctttgacgaagcgcacaacattgacaacgtctgtatcgaatcgctcagtatagacctgagcgaggattccctacgcaaagcgactcggggtgccaacaacctggaacgcaagattgaggaaatgaagagcacggatgaggaaaagctcaagaatgaatattcaaaattagtggagggcctgcaggaagctgagaaggcccgggaagaagatcaattcatctcgaatccggtcttaccagatgacctactaaaggaagctgttcctggtaacatccgccgagccgagcatttcatctccttcttgaagagatttatcgagtatttgaagacccggatgaaagtcacccatgccatatccgagacacctccttcattcctcactcacctaaaagaccttacctatattgaacgcaagcctctaaggttttgcgcggagcgtttatcgtcacttgtacggacgctggaacttgtcaatattgaagattatcagcctcttcaagaggtggccacatttgcaacactggtcgcaacttacgacaagggattcgttcttatcctcgagcccttcgagtccgaagcggctactgtaccaaatccaatcctccatttcacatgcttggatgcggccattgctatcaagccggtattcgatcgcttcagctctgtgatcattacatcgggaactttgtcgcctttggaaatgtatccgaagatgctggggttcaccgctgttctacaagaatcatacagcatgacactcgctcgacgatctttcttgcccatgattgtcactcgaggctcagaccaggcacaggtttcatcttcctttggaattcgcaatgaccctggtgttgtgcgaaactacggaagtctagtgaccgagtttgctcgcatcacacctgacggcgttgtagtcttcttcccctcttatctctacatggaatcaatcatcagcatgtggcaaggtatgggtattttggatcaaatctggaactacaaattgatactcgtcgaaactcctgatgcacaagaatcttcactcgccctggagacctaccgaacagcgtgttgcaatggacgcggcgcgatcttgttctgtgtcgctcgaggaaaggtttccgagggtattgatttcgatcaccattacgggcgtgcagtgctgtgtattggtgttcccttccaatacaccgaatctcgaattctgaaagctcgtctcgagttcttgcgtgagaactatcgtattcgggaaaacgacttcttatctttcgatgcgattcgacatgctgcccagtgtctgggtcgtgtcctgcgcggcaaggacgactatggagtcatggtgttggcagatcgtcgattcgagcgaaagcgtccccaactccccaagtggatcaaccaggcaatgttggacagcgaaaccaatcttagcactgatatggcagtatcaaatgccaagaacttcctacggactatggcccagcctttcaagcagaaagatcaagaaggaatttctacctggggcttagctgatatcgagcgccatgaggcaaagagaaaaacggaggaagcacggatgactagagaggaagtgaataacgggcacccaatggacggagcaattccatccgcatcccggatcgtcgtggacgaatacgacgatgacattgatgaggacctcatgatgcttgatgcgtaataaaataatcttgttctttatatgatgaggcatctactagcataagcagggcgtttggaattgagcatggcgccatttagcacggcgtttccaaggcagaaaccatctaccttacaattgaagacaaatatcttaacgactatcctttggagctatggaagctatctataatattttgagcatagctttgcatgaagtacgggtaggttctttataagctttctagatcaatttcttcggagaagatgatctcatgtaaacatgtaggtatatcattgacggattgcttctgcttcttcggcttaacaactcttttcttccgtaaaaccacctacagtttgataccccagatggacgaccgttgttcggagaccaatcgaaagaggagacgaatctcgaaaagaccgaaaatatttatgctctgcagaagttctgatggaacttctgagttacaggttattctttaaaagaattctcagatacgacggggctactacatgaagtagaagagttggtatcttcacttatccgcctcgaaaatcaccttgtgggcccgcatgttatcgaaatcgtcatatctaccgaagggtcaatcatagggtgtcaaggactgaacaagaagaacttacgcctggacggcctgtgagagcggacgaatatcatgacacatgaagctaggaaacgttagatcctcgcgaaacaaataagagtaggtcaggcaaactcacttgagaatgtcctgcttcttttcgaagaggtccagcgccggaccaaagatacctagcacagttgagcaaaatagccaaagtaagatgtggaattaaacatactccgaacagggcatcggcccatctgtagactgaggttcttcgcgtaggcttcattcccggtccacgggatctcctggttatggacgcccacactcgatatccggccccaggggcgtaacaaatcaaagcccagcctgagagcgtcactatgtccgacgacttcgataacgatatcggctccacgaccatcagtaagatcctttaccctttgacgcagcccttctccgtcttccttgaaattccaaggctccgctcctagactctgtgcaagtgctagtctggaaggtacactatcgattgcaatcagagtcttcggcttgtaatcgagagcaccaataagtgcgcagataccgacagggccacagccaaagaggagtagcgtgctttcgtgaatctcctccggagttaggccagagaaggcgttcagagaggcaaagtacccggtggggaaaatatcggccataagaaccaacttcttctcgtcgatggaggctgggactttgacaagagtcgagtcggctagtggaatccggacatattcggcctgtccaccatcaagtgcaacagtaccgaatagctggcattgagcgcaccgagaggagaagccacgcttacagtagaagcacttcccacagctcgtggtgaagggtgagactactcggtcgcccttttggaagttcttgatgtccgatccaagttcaacaacctcaccagtaaattcgtggcccatgacaaattcgattccggacttttggtggccgcgaaagacatggagttcactttgcaaatatgagcggttgtatgctgttagatatagttctctgtttcttacctgccacatagcgcagtgtatcgcaccttcaggatgacatctgttggatcttggatcttggggatgggcttttgctcgatgactaccttcgacgggcccttgaaaacgacagcttgcattttgcagtatatatttcctttggtttgtgtagaatatgctaggatgttgaatgacgttggaactggaagtctaatttaagtagagatatgcctagtccggcgacatcaccgacggacctcggcaggtctcggatttgtggtggcacgactggaaaacgacaaacaggattttggcataattgtattgaaaagtaacaagacctattcttcaacgatttcgagtgttctaaagaggcctctgtccgaaaggcaaaactggccttcatccatccaatgaagggtatatcaaagccgtttttagcggcgggggggctttttgcggggagaaaagattgtcggccttaattttaaggttgcactgaccgcttttctcaccggctttactttgacccctctattaattctcagtggtacctttgctttgtatgtaagccccatataaaagtaagtcactcatttaaccttaattcaaaagtgtaaaaatccagctggcagaactatatactacctgaggaatgcggcagaaaccaggcattttcaggcaggagtggttataaacaagtaaaagccatattacaacaccctaaggaaaagatctattttcaactagtcaagatgctaatatgaacaggacttttgagttccgctgcaaaaagacaaactccagatcatcgacacatcaaagatgaagcgaaaacacaaaaagaataagagcttcgcataaacacaatatacacacatatgaagggggaaaaaacatacacattgcagaactccatccagtcaaagactatgctacaggagcaagaatgtcgaaggaaccagtgccgacggtgccgacacggccaacaacaattctgctactagggctcttgagattatcattacctctctcgagcacaacgtccttcagggcaccgacagtagtctcgaaactggcccgcgcgaaagcagacgaggcatccttaaccaagccgttacgactgaaggccttgaagccaccagactgtgtcatcacatcaccgatcaaattcaagtgacggttgtcgacggagatactgtgaccaccgaaaacggcatccatttcgcggacgatggtagcgcgagcagcttcgacaccgtacaggttgagcatgtcgtggatggagttggtgtagatcgagtggggcttaatgatatcctggtagtcgcgcatggcgagaaggttgacaccctcggtgaggatgttggcgggatcacccttggcctcatcggccgggacgaagacacagttgcccatgccggggatgcactgaatgacggcgaggtggagaaccttctcaaccaggggaaggaggagaagcttgggtgtctcaacgtcgtactgcagttggatggagcacgagttgcccttcttcgggtcgaacttgaactttgtaatctcctcgaatttgcctatcacatcctcctcgcgcgccttgctgtcttgggcggtctcgtcatcagactcatcctcggaatcggagtcggagccgtccttcatgcgcacgtcgcgagtggccttggcaggcttgctgctttcattttcgtcatcttcgtcttcgtcgggggtgtcttggcgtctgatgatatcctgctcggcggcgtcgggtccttcgtaggagacctggtggcccctgttctgagctccggcggcccgcttggcatcatcctcatcatcttcattgtcgtcgtcggctggttgggcttcggtgtcggcgcctctgggtgcctccgcgattttaccgactgaaacaccgatttcaggctgagaagttgtgcccttgacgcccttcttctcttcgttgcgcttcttgagctcggccttggtgagtctcaccaaccgagggatgagcttagattgcagagcaatcaagacatccttggtctcaatggcgtattccttggtgtattcttcagacgggaagaagtcgatctcgatgtcgtagattttagccttagcgtagccaatgcccgagccaatgcgttccttgacttgcaccttgtcaacaagttcagcaatgctcagtttgctgatagccttggcgaatttctccgagtcctctttggaaatctcctcgttcaaaagaagagtcatcgtaggcgtcataatcttggcacttgctgtcataacaatttcacgaagacggggaatacccagtgtgacgttctttgccgagtgaccagccaaatggaaggtgttgagagtcatctgtgtggacggttctccgacggattgaccggccataattccgaccgcctcaccggggtcaatgatagacttcatgtacttcatgttcattaaggcctcgaaggtcctcttgctgaccttgccctcgatgttcttcttcttgtctttaatgagcttactctggttgacatccgaatactaatttgaaaagcttgttagaattgcaaagaatcgcagcgaagagatagcgagtccataccttctttagctcctgtgcgaacgcttcagatgtacttccgaggtttcctccaggggggaagtgggataacacagggtccacagcatcaatctttccagttttgcggaccgccttcatggcatccttgtgccagttcgtgacattatccttcgccagcatgtgataatcatctgcctggacttgcttggaaatggagatgtggttctgagcaaggaaatcaaagtcgttcaggtgtacctgtttggtgatgtcgagaccgtcctctccgtacaagaactggacaatggagccatctgacgcttcgcggacagaggagtcgtattcagccttgagaccttccatacccttgattaaacaacgttgcaggtaaccagatctagatgtcttgacagcagtatcaatcagaccctcacgaccagccatggcgtggaagtagtattcttggggcttgattccggtcaagaaacgaccagagacgtaaccaccggccatcgggtgagtttcgaaagccttgaatgacggaagagtctttccactgatcatgagtggtacacggcgaccctcaagaacctgttgaccaagattacaagaaatcagattggcgttaacactagatcccttggctccagatatcgtcatagactgcatttggttccaggggaaaggcttagcaaggccgtatgggagacaggcgctggtgatttcagaggagagcttggcagaccgggcgttagaaacactatccaggccactttgcttgtcgtcatcgcgaagaacctcctccaatcgtcggttcaactcggcagtctggtcaccaggagcctggtccaaggtgacatacttcaaagcaacttcgcgacccatctgaggagcagtggccagcttctccttacggatacggtcaccctccttggtcaatcgaagatcgtcgataccacaactgaagccacgcatgttcaggacgcgagtgagaagtcttccgagaataccgataagcttgccagcaatgctgtatccataaacttcatggatggcatcgatgagaccaccggccgtgggaccgagctgtttcttatcaaggataccacaaaggtactctccatcctggaagataacttctccttcttcgttgccctcgccccatcgatcgccaggggttgaagacttgctcagcaaggtcaaacctcctcgctctggaggctggatattcttgagaattgtcgtgatgagctgctttccggtccacaggcacttgggcttgcgcatggcaggctcgaccagttggatccggtcagtgacaatatgcgaatgttctggtctcaagcaactgtacaacagctggtggtaatcctcctcgtcatagaagctgtcacggcacgtaacccacgttcccatagaaatatgatcttgaatcagacctctgagcggttttccggatgtggcaacgagatactggtggtcggcatctgccaacattctggcttccgcttgggcaagctcattctgagggaaatgcatgttcatctcgtcaccatcgaaatcggcgttgtaggtgttacaattggcgtagtgcatgcgaataacccgctcattgggaaggacacgagccttgtgacccatgatggagggtttgtggagagttggctgacggttcatcaagacgtaatcaccagtggtgagatgacggtagaccttcttgttacgcgaacctttctggcgccaatttgacggtgcgagtagtgagttggcaagtgctgttcgctcttccaggttcttgaacttgaggttgatgacttgtccgttttcgttctcgatggaagaagcgccggggtatttgtcgggaccgttgataacagcctccttcaactcccagaagttgtggtttgtaacaggctcagggaaagtcaacttcttagcgaagacaaggggtacaccaatctcattgggttcgatgttaggatcgggcgagataacactacgagcagcaaagttgacacgcttgcccatcatgttctttcggaacagaccttccttcttctcgagaatctgcttgataccgttaggctgtgctaaggcagctgagccggtgacagaggtacgctcgcggtccaccaacccgttgaccacatcttggagttgaacaatggcttgaaggaggtcactgtagtttcgtgcccgagacatggtcttctcttcctcgttttgaatctccttgctgatttggttgatagtgtcacaaccctttaaaatcgcattgaacgaagtgttctgctgtgcttccatgactgttccggcaccctgctggactgcggggcggtacttgtttggtggcaccaaaagactcttgaagaagaacatgtccgccgacacaactttcattcccttgggcacaggtcgagagttgtagacaagctgcaggatctcgctttccttttggaaaagaagatgaagagctccatagacttcggaagaagacatgaattcctggccggtcgatccctgtacctcctgcacgacagccacaccacggcgaatttcttcctcagctccgtggatctcagaaacgccgttcttggacttagagttcctttcttgctcgagaaggaccatggtattcggtgcttggaatcctccttgcaacattgcaagcttttgcttctcgggtaattgctttcggaagattttgttgtagcgatcctttttataggcgggggacactctgccataatgttagctggaaagccaaagtcagggtcgaggaatattgcataacgtacccgctgcagctgacacatttcttgaacgaattgatatccttgaagaaggccttaatcaactctcgcctggcctccgcggcaatagggttttgtccgccaggcatcaaaccgtccaatttgccctccttcttggcttcgcgaatgcgccgagtgacataatcagtcctcttttgcatatagtcatcctcatcgggatcgtctgagtcgtcggaatcgccttccttgctggtcgcctttgatttgctacctttgacggatcccatcgcatcgacaacagcgacttcgtcaaccaagccatattgcagaaggcgcaatttgcagatgtacatgttgacctggttgcgacccatctgcaggcgaaggcagtatacacattgtgctcggagaaggcggaagatgtgatcgaagaaggtgacattatagaatggtactggcagctcaatgtgtccaggatgtccggtacaagtgaatgagttctggcgacaggttgtgcatctgtagaataagaaaaactcaaacattaaagattgaacagtatactactcaagtcaagacttacacatgatctccccaagcgcccatagcagggtcttgaagaccaccaggaacaggattgttaaatgaatccagagtcggagtattgtgaattcttttcaccgagagagctttaatctcttcctcggagtacacattgaagtcgaccccattaatcgtcgaggcgacggggcgcgcgaaagttgccattgtagcctgcagctccttgagcaacagaaaacgctgtcgcgcgaaatcaaagtgcttggatacaagatctccaagtgcttttagttctggagcgaacttttttttttccggaccaacttcttttctgccatcgcgccaccgccttacccttttcgggttccgtgtggattgatgcacaactgctgttacttgtctatcctttacgcattcaacctttttgtttttcctttcgtcggaagaccgagtgagaggccgtctatattatggctgatgcatcgggcaatgcgctcaagcgtcctcaccctgagggtcaacacgacaactcccagaaaaggacccgctccaaccatgggtcgccagcaccaggtcaaggaggtgctgccccgggcaagccagatgttgcgaaaataatggcagaagcaagggcaaaggcagaagctgtacgcgcacgtctacaagcacacggtagcttaccagcgaccccaacaccaccgcctgcaccttctgcaaatcctcctccaccaccaccacccgctcctgcgatgtcgaaactagaacaaatgaaagctcgagttgctgctgctactcaacgagcaagtgtaccctctcagccgcgacccagtgcacccgcattatcctaccaaccaccggcgcatgacgatgagggcatgtcgaaggctcgcggtggtctggatgttggccttcatcccgcgcttctgtctgatgctccaccggaatatcgtggtgcaaatggacggcagtctaagccaaaacgtgctggtgggcctcagcttgatctgtctggtccgtccgccgaggaaatcaggaataatccttacttcgacccctctctcaaccccaaagcgactattgcaaagccccgacaaacccgagagctcctttttaatcaaaagggcaaatacatccaacaggcagcggctctacgcagacaagcacagctagaagctatgaagaaaagaattgcagagaaatcgcgacaggccggacttgacgaggatatggatgtggaaaaggcattccttgttcctgctccacccgatgtagagtggtgggatgcaagattggttaatggcagcgactatgacgcaattgataacccggaaaacatcaaacttgataccctcaacagctatgtccagcatcctatcgagctcgaacctcctcaagacaagcacatgcctgcacagaagcctatgttccttaccccgaaagaacaagccaagattcgacgacagcgacgcatggcagatctgaaggaacagcaagccaagatcaggttgggactcgtggaagcaccggctccaaaggtcaagaaatccaatctgatgcgggttttgggcgagcaagctgtgaaggaccccacggccgtggaagctcgtgtgaccaaggagatcgcagatcggaaagcagcgcacgagcaggcaaatgaagaccgcaaactgaccaaggagcaacggcgcgagaagttggaagctcagaaagagaaggatgcctctttgggcatattccaatctgtgtatcgaattgacagtctggcgagcggccggaaccgcttcaagatcggcaaaaacgcagaacaaaataatctgacgggcatgtgtgtcatgcatccccggtttaacctggtgatcgttgagggcggccaacactctatcaacaattatcgaaagctgatgctgaaccgcattgattggaccgaaaaccctggatccgatcgagtgcctgcagacagccctgaagctcaggtttcctggttgtccactgaagatgataagggagagccccgggattttagcgcgaacacatgtaatctcctctgggaaggaccgaccaaaggtcgggccttcaggaaatggttcggtgctcgtatctgtgagaccgactctgctgccaaagcagccctgtcccgagccaagatggagaacttctggacactcgcgaagagtgccaagccagctgaatattaacatttcctacgacagataatcaacgtctaggtttattgtacgtctacagatagcgaacttgcttcatagcctttgtcattgtcatacatgatccataatacttcaggtatttactgtttgacactgtaaatcattcaaaacaagcactcaattagagctatggaaaactttttaaccacccacataaaccacgctccgtatgcaaagccgatgctaggatatctatcatagaagaacatgtatgaaaaacaaagtatcaggaaggaggaggaccctgatttccgccgctcaggttgcgtagcagatccagctgagctttaacttggtcaaagttcatagctggattttgggcctggggaggctgatgctgctggggctgttgttgaggctgttggtaatgctgctgagactgttggtaatgctgctggtgttgcagaagctgcaggaattgttgctgctgttgttgttgcaagagagccagggattgaggattgaattgagcagcaccctgctgcatgttctggaaattattgggctgcggttgttggaaggctggatatggggagaactggaaaggcatctgtggctgcgctccaccttggccgaattgcggctgttgcgggttctgggcttgctgtgtgtattgcgcatacgcggcgaagggctggggcatcccgtatggctgctggggttgctggtacattggctggccgtaggtagcagtgggttgcgcttgaggctggggctggggctcgtggattgagccgctggcctgctggggccggcgatcctggtcccactccctccctccgcgtccacctctgcctcgtcctccacgtgcacggtcaccccgaccacggtcacctcggccacgacctcttccgcggaacccaccacgctcgttgccttcaactggtggctcacgagttctcatcatctcgtggaagttggtagggcgtgcaagaggggtgtatccctcctcaccgccagcatcgtcgtagttgagctcggtctggttcaatttggaaggtcctggggctggcttcttgcctttggggccttctctggcttcctttcgatcaagtcgtctctgcttcagtttccgcttgtactcggcttctgcttcatcatcggagaattccatctcttcggcggcaacttcctcgtcgtggaagttagaagcgtcacttcccttcatgcccttgagcggctgggtgaagacaaaggtggagtgtccctcaacatagaagatatccttgcccttgactaagcccttttcttgaacttcggaggctgtggcgtatgtgacagtatacagaggattctccactctgcccagggtttctgctactacaccaatgatctggcgatcagcagagcagagcaaggagcccgactcaagcacctgatattctccagaggtattagcctcgataagaacattgttatcgatagcggcatgaactttgccgaggaacacaatcttcatctcgggggtgatcttgacgtcagggacaggcaggacctcatgttcgatctcgttcgtggtccgcagttgtccgcctggtttccccttgccatctccctcgtcatcagagccaccttccgcccgcatgaggatctgcgcttgctcctcggcactgaggattgggtagtcttcatcgtcgctatcgtcggagtccgaggaatcggagctgtctgaagatgactcgtacggggaagagtcgacctcccactcaggatgctcctcttcttcgacatcgcccgcctggccagtggcttcgatcatattgtcttggtggttatcttgcgcgacatccatagcttcgctgaggggagcagtgggctcatttgtgaaatggttcgcctctgtctccttcttgatcattacttcggtgggctcgtgctgggatataagatggatttccgcttgctggttttccgtctcgccttcttggtggtctagttgatcttgctcttgctcttgcttgattgtgtgttcggtcaaagccgagccggtttgttcgtcggaggagtgttgaataaggttcaatccggggatatggcttggcttctcagttgtgctgtctccagcattcaggctggttgcgccgatgtcttgggaccctgcgataggtgtctcgataagacagggttttttcgaggcagggccttcaccggcacctgtgctgtcagttgcagggttttgatgtccatccatactaaatctccaactcaaaaacttattgcataaaaaccagttcaattcgaaagatcaaaagccggacgggaaacttttttttattttgccatactctgaagggcggtcaacaatgtcttatcggttatcggttatcgtagctctgtccatggatgattgccttgcgacttaacttcaacgtacaagatggcaggaaacgacaatgccctaggggatgcccataaacctcggacaaagaagcagtatgttcatgaacctgtgtgaaatcaaacatggtgctaacctatgtatagaccgccaccagctcccttctacattcccctcaacatcactctgtacatattcctagttgccaacactctcgccgcactgtactctccaattcaggattgtgatgaggtgttcaatttctgggaacctacacattatctgcagcatggatatggtcttcaaacctgggaatattctccggtgtattctatccggagctggctctacgtgtcgctccatgctgctgtaggcaagatcgcatctttggtggtccatagcaagacagctgaattctacacaattcgcctatctcttgcatttctgtgtactgcctgccagactcgactatactctgcgatatgtcgtacactcagtccccgcatcggtctgttttttgttatgatcatcacactcagccctggcatgtttcatgcttcgacagcctttttgccctctacctttaccatgtatatgtctatgcttggtctggcatcattcctggattggaaaaactgccgaaaaacagcgaagggcatcatgtggtttggcctggggacaattgttgggtggccgtttgccggtgctctcattgtccctcttttagctgaggaggctattgttagtttcatttctgggtctgtcggctcactgctgtacaatgtctttgacggtatcactcgttgtttgtcgatcctggtaggtgacttcctacttggtttcaatttctttactaagctgtatcacaggctctagaagttgcggttgactatgctttcttccaaaagctcgttctcgtgccttggaacattgttgcatacaacgtcctgggtggagaaggtaaaggaccagatatctttggaactgagccatggactttctatattcgaaacctcttgctcaacttcaatgtctggtttgttctcgccatgctatccgcgcccctcctacttttccagatcgtcttccgatcgcacaccgcctccttgcaaacctcattgcggtccatggccctggtcgctccattttatatgtggttcgggattttctcggtccagccacacaaggaagagcggtttatgtacccagcatacccgttcctggcacttagcggggctttgagcttccatatcatcctaacctaccttggctccactaacaaaaaggagctgatcggccgcgtaccaactaaattaaagattgctgcagctatgtcagttgttcttgttggtctgaacgctggcatgctccgcactctaggtatggttacggcttataacgctccattgaaggtgttcgagccactacaacgtgtggatatcgcacaggcaggagactcggtgtgtttcggcaaggagtggtatcgcttcccgtcatcgtatttccttcccaacgacatgcgcgccaagtttatccgaagtgaattccgaggactacttcctggcgaattcccagatgcgccaagttatattgggcgtctggatggtgcctcacagattccatctggcatgaatgatctcaacatcgaggaccctactaaatacgtaagtgtctcaacgtagccttagaattattataccctattaccctatgctgactttacaacaggtggatatctctcaatgttctttcctggttgactcttacttccctggtcacgacgcaactgagctagagccccattacctcctggacaaggcgcagtgggagacgctttcctgcgcaagcttcctcgatgcgtctcaaacaggtcttttaggtcgattgatctggattcctgatttcccgatcatcccagctcgctttcgacgcaaatggggcgaatactgtcttctccaacgaacagtcgcaggccatgtataggtcttgaatccttctagataaaacctctagaagaattatgtaaaaacatcaacagtgaaacattcactcgcatcgagtgcaaacaaataagtaaacaagaggttatcaagtacatgcgtagcttcacctttcccaattagggcaaaatatccctcaacttttagcttttctccgcagataaaccctgactccgcttcactggaggccaacaacagacaaaccaaggacaaaattatgcagtcccggatttgacagctcgaaaaggacggtctctattcccagccacattggcatgttgaccaaagatggactatctcgtatcggattaacacggcatctcgcatgagaggaccatctgggcggttaatatccttctccgcactccagacttgataaggctttgcatttactatatactactaaagttcctcgacttctatcctcaatgtatcctcgaactggctactgcctaaaactactctgccatgaccatgtcggtacttgagtccctatggggaactatattatccatcccaacgaaacaggccgtggatatctttatcattttcgctgtctgtatatggtttattatcgtcgtctcacggaaatgggtttctagtacgaccaaagcctcgaaaggtgatctagagaaacccgtgcgaggaaaggtcactaggccacctggtggtaagtaaattcaggatggtagttcatgcaagagaaagtctcactaactttctgtagaatggactccatcggactttaaacggccaacagcagccccatacgcaggatgggatgtccactcgacgaagccaattccctaccggccgtttagatatggcccgtaagttgaataaatcaatagagatactgctagccgtcttttaacctctcctcgcagaaaatactacgtcacactaggtttaagaagcatgaaatgggacgaatggatcggtgagtcgttcttcgatagccagatctcagcagcccattgacctcatatacccggaacacagagctcgacaaccactatctcaagtaccacgccgacaaatcacgccgcattgaagagcgcggcagcaaatgctgccacaccgcaccagaggcaatggatgctgcaattgaactactggaagaactgtaagagcaatcaaaacatacacatccctatccaagacctcccctaactcctctcaccagatgcgcctacctccccgaaagatacccaagcatgttcaccaagaccgcaacaggaataaccaacaaagcaacctacgaaaccttcaacataacccaacgcccactgccagaagacccaatggcaacagccgcccgactcgtccaagacgacctagcactaatgatcgagcgcccagacggcgaatactacctcctcgccggcgcagtcctattagcgggattctggcgactgagcgacaagttcgggatgcggctctcagaaatccacacatcaggcgacgtaccgcagtacaagagcaagctggaaaaggggatgctgaatttcttccgccgactgcggcccgaagagccggttcttcggaacaattatttcatccaggtcgacgataacctggcgtggtcgcatagtattgggcctgaggatgccgagacggtgtcgtggaatacggcggagaagaaccgggcaattgagaatcatttcttccgctccgagaggcagtcgctgagaagattgcccagatctggggcggtggtttttaccattcggacttattttgagcctgttattggtatttctgaggagccttatgtccctggccgtttggcggatgcggttaggagctggggggatgatattgggaggtataaggggaaggagaagtatcaggatgttctgttggagtatctggatgagaagcatagactgcaggttgagggggggttagatgttgagaaggaggatgaggttaggaggtatcctctttgaatgcaatgtgaatgtggctttttatggatgatgtctttccttattcgagtattggcgatattcctttccaagatcaggactattagatgcaaatattgcaatgcctgatcctgcgcataatcaaaatcaagaatatgacctccggaaagatgacctcaacaggcgcaatatgatgtacatagtaaaagagcatgctcagtgctaaccaactgcatattcctgcacttgctgaatgcaacaaaaaagcaagtctcaactcaggctcaaacaagacagatcatatatccgcaatgggcccagctctccgacctccaccccgtctcgcataagccatctcacgctcctcgcgccaagagcactcatcgcggaactcgcagacccgacatttccacgcatccatgatatccacgccaacgggatctcgtttgccgcgccaccaggtcatctggtcagcgaggtaggaggtgagggttgtcggatcgaagaggaaagatcggcttccgatgagctgtctgtttaggtcttcatcggggacagatgagagatatctagccgtaagcactggcgagaggagggttgagtatggttccaaaagctctggctgggaaagtgatggaattgatggtgcgacggattgtgtgtcggggacatcttcggggaggaatgtgaggcggagttgctgtatcatgagactccaaagacgggagaggttgttatgtgttagaagggtatcgattgagtcctggctagcagtggaaggatcccggcactgttcggattcttgggaggaaagagcgtcgaagaattggtcgttcaggccgccgacctccgaaacgaaggcgttcgtgaagggtttctcagcatcgaagtcgtaacgagtggcaaggcgatcgatagttacatcgtcactcgtgatcagccggttgagcatatggtagtagagttgcagctggagaagagttggccggaaccccgtgcttttgacattcggtagtgatcggttacccttcgtcttcacgtctgtcaaataaatccggcgcaggttatagaccgccgcgggcaattctggctcagtgtgccccgtttccgcggcttcactttgccccagatccgaaagcttcatcccgccttgcgaagaagaaagcaaaaagtccgacaaggacatctgatactccggcagcgcagcgcgcgatgctacagcgtcggcatagaacccagcagcagtagcctcaagctccgggttgggacattcataggacaactgatcaatgatgccattaacaaactccccatcgacaacgccccaaacctccagctcacgcgtaacaccatactcgcgcagcatgcgcagtccctgtataacattccatatcctgagaccccacgcgtcctctttcgtcgtgatttccacagggacggtagtgtagatctcatcctcgagcgtcttgtgcatggtactccccctcttcatcgcagcggtcctcttcttccgcccatgtttagtcaacgagaaccagtactgcagctcgcaccaagccggcgagaccagatccgtcaccgaaaacgccttgttaggtgcttgccggaaccgttcgacgggggatcgagtatcgagcgctgcggtgacaggatcttgctgtgtcaattcgagcgcgcgcgctgcgttgcgctcgcgttctctttctcggccctcagttgaatcagcggtctcgactaaacgcttcggagaagatgtcgtcagctcaattcgggttggatgtaacgggaccaatataatgggaatgggaaagtgtggatgatcaacggcgaagaggaagaggaaaagtagagacgatatagcataccaaacgggctactcctgttgctgttgccagcgcgcggatctgacctccccattgcactcgtcctcgcaccccatctagccgtctgacccggtcgaggctgcgactgccgccatgacgagtaaggctgttcccggcccagcaccttaggcagccgagcgctagctggctcaatgccatcctcgacatctgcaaggagtgcttctagagcttccggttgcaatgactcgagctcggcgagtcctggggattttggtgcggtgatgtgttcgatcggcgttggggttgagggccaggttgatgtcgagatgaaagtggcgtcggcggtcgcgtgttccgcgaaggctttgtttaacagattgttcaacagatcctcttcatctagagtgaagtcggatccgtagtcagtgtcattatcatctctctctaggcaggacatgcctgcgacgggagggaatcataacctgttagatagagttgatgttcgggtgcgtcattgcgatgttgagggagctgccttaagaatcccgttgttcttactggctggccatcacgtacttgataatagagatattggataactgtgacataaaatttaaatagcaaaagagactgaagtctattgatctaagtaattgctcttggtatcccatgcatcgctctaaaacagaagaatcccaacgccaatactccgcggggatctatctataaatgtatacctccactcagcctcaactatacttccaggtctactgtccacgcattcatatagtcccagcagagatcatattccccccagaaacaggatgcaaagaaccagcacccatgccctgcgcctcagcaagcgcctcagcagccgcaacctccctagcagccttcagattcaaccagttcagataggtctgccagccaaccgcaatgcacccagaaaagacgttccggaattgcgccggcacgtacatgaagctgaacgcagtaacaatcggccagagcttaacgctgtttttgatactaacagggagagccttcttcacccgctcccacgtctcctcgaacgtcgaaccagcaagaagagagtgcatgctaaagaagtacgtgttgaagacaggagtgaaacacgtctgctgcacgacgactttcgtcaggatcgagaggaatttgctcgggtagttgaaatggttgccgaggaacatgaacctgagagggaagttatatcagttaacagtgtacaatacgaatacagacctctccactaatatgtaacaatctaatatccctggtcgcatgtcgcacgtcgccataatcaaatccgcatcacaaaaacataccagtgataagttggaatactcgacgcagcgccaacacacaaactccgcagagtcctaagcggatcataaccagcgctcacagtctccccttccccaaccccagccgtatccccatcttctgcgtccgatttcgcaggcgcaggaacctcagaaggaaacagcatctgcgcgctcagatcaccgcacaggtatataacaatcgagctccagaactgcgttgtatacggcttgcgatcttgcgcgcgcgcgtaccatctcccaaacttccccagcggaccggccattaccaccgcgcggaagccgcgacttcgcgttggtgtggtcggtgctccggctgcggtagcggcaggggctgtgtctgggcgcgggcgcaggggtggagttgggtggcttgaatggtgcgagtgcgagtgcgagtgtggtgggtgtgcaggtgtagcatttctctctgctggtgtctttcccgtagaggagtccgagttgtatcggtgttgtgggcgtccgcggcgcaatacttgcggcttggatatgggggttatcggtcggaagggggttgagggtgaggttgaggcccttggtaagagggcatttcggagggggttcatgaccaagacctcatatggttatttgagtgaggatagttgaaggtggaagtaaagaaaattgtgagtcaagaaacaatggctttgaaatccgacctcggggattgtggcgataagagccgaaaagcgggggaaatgccgagatcagtcccggatgcggttctaattagggttgggttaatttgtttacatttaactctattcgtagaagatatatatagacttgtagaaaaggcgtccgaaagtagcctggtatgtatatgtatgtatgtgtttcttaaatcaatcccaaactccagctatacaaatgcagcccataaaaacattagtcggatgaggttaccctcggtgatatgaacgggtatcaaaatagaaacaaaggtataacacgcaaaaagggcacttttagtgatcccaaagcaaaggggtcaatagaaactatgattagtgacacagacatgtataggtatgacaagcccggacagagatggtaaggtgagagggaataaacagctgatcatcagccgcctattgcttgaaggattcacgggtgttgacacggtcgatatcgtaaggatttccctcatacgtaaccgagcgagccaacgaggcaccagtgcgaatagaagcaagggagtgcgcacggctgcgaatgcgctccgtattagcaagttcttcaacgccgtcctgggattcgctggagagtgaaccgtcgggcagagcttctgtgcggtcgtattcctccttctcatcttccatcggttctggaatggcctgttcctggatcttgcgcatgaatgcctcggactgggcggcgaacttgcaacgggtgcggatcgcgggtccgtatttgtagaacaggaatgggaagggcacacaggcgagcgccaggaaggccgggatcgatgaggcccagtggatacccaggttgttgtacatgtaggtggtgaagagagggaaagcggcaccgaatagggaacggataacggagttggcggctagcacggaggcggcgaagatggtgtatgagtcaatgaggtagttcatgatgctgaggaagactaggaccattccgaagccaaagggaacgccggctgcgatgctgaccatgaagtggattgaggggtagttagtccatgcgaaccagaatagaccgactgggattgcgacggatgcgacgaggcaaggcggaagacgtgcctccgggggtgcgaagccattatatctgtcggatacctcaacatagcgcttgttgtcaaagagggagtagatgacggcagacaacattccgatcatgatcccgaggaaggcgaggccactaacaccctggttccagccacgggactgctcgtagacaatggggaaagcggcgaacatcatatacaaggtaccgtaaacgatagccatgtagagagacagcaggaacacaataggctcctggaacaacagaatccaagggcgggagagcgacaccttgaaagagtccttcagagagaccttgccttggtcgatttcaatcttactccggtagacctggcctgacagctttgacagtctctccgcacggcgacggagtagcacgggcgcataggtctcggggatggtcagagagccaataatccaaaccgtaccagcaaagacggcaaggaaacccatgacccattgccagccaccgtcactcataccaatgaatccaccagcgatggggccgatgatagggccgaggaaaggtgcagcggcgaacaagctcatagcgatacctcgctgtctagcggggaacatgtccgcaatgacaccaccggcgttggtcaaaggcgaagatccaaatgaaccggcgaagaagcgaaggatgatgatagaccaggcatttctggaacctgcgacaccagcattgaatgccgtgagggcggcgtaggtaccaatgaacagtacttgacgaccaaacagctcactcagtggagcccagagcaaaggtccgatctataccaagcaaataacgttagtatgcatgcgaggcagattgcgcaagagtaaatatctaaaagatgagatcttaccgcgaaaccgagaacgaaaagcgaaacaccgagagtggcaacttcttgtccaatgtcaaaatccaccataatctctcgaataccgccggtataggcagacgacaccagtgaaacagccaaggttgcgacggcgaccagcatggtaaaagtccatttcttcacctcgctaaagttcatgggattgcgagggtcgttgggaagccatgttactgcaaaagggtcctcatctgttcctgaaccggggtatgggtggtcgatgatctcttgtgtgacgacaccttggtcaaagaccaatcgccagtatggaattttcgttggggcggaggactcgatcttgtccgagacctgagggtctgagtcagctgccatggtgggcaggtagtgaattaaggtttcgatatatagtcgacagtagttgagtatgtatttgctaattagaatgaaaattgcgtgggttcctgaagctatgcgggggatagaaaggttaaggaatgtcgaaaaattagtggaatgagaattagatatggacgtcaactgccagctatatataaagggggggttgtcaaatttatgaacgcgatatatgcaaataaagtacggataagtggaataagtgggataggtgggcctcggacccgggcaagatatgatccgagaaaatttgcgatctggaccccaggggctttatttgatattgatttcatcctgatttcatgcctaatccgtacatacctctcagactgaattgaagggctatgtgtcgtacaaatatgagtgttcagatgcagccctggaggcaaggcgtacagtgctctcgttctgtttgcagccacgtttttgcgccacgtgatttatgcaggttttatgtcgagccactcgggtatgcggcatctatctgattgggtcacttgaccgcaagtttcagagcagatcaataagccaacgaaaggttaactacgggtttatgatcctagctcttctattctagtctagtctattctgaaggttcgatcttgttttcgatctcgtatctctttacatcacggagtactccgtgacttttctaataatgtacagtagtattgtataccaataaatatgacaaatacacatggtcatgcataaccctcggaccccgcccacattcggacgttccgcatgggactcggtacctaaccgaagtttcatccacccgtagacgttccaaagaacagatcgagaaccgatctaaagatcggatattcatggcaatctccgatgcacgtacataactatttttttatgatctttatcaccactatgaccgattaactccgtgtacatacatacttcataaacacgaacagattctgattattcatcaaggtcaggggtctgcataccagattttaggaccccggatgcaagtttcccgatcggggtggcgccgctttctggcgcttagggtcctgttcactgaatatctgacgacatgattacaacatagggtctttgttcagtgacacttgattctggacttcaggtttatttattgaggggatcactggtttcgaattaattgagtagttaccccggggcctcagccttaataactactggtcagttacctgattaggttagaggaggcttaacattacgtaaggcgcccctctgttgggtgccgaaccttggccgaactctagagatatagcctttttagcctcaccttgtccttcttttccttttttttttctttttttaaacagaggtacgtacctggatgtttatatggttcctagccagaggtagaaccttggaaccagacctggaatgccttaaaatatgtgtcatgtcagtcggtactgcagatcacttacttggacgaacttagatatatatacatattgaagaggggaccctgccacgaaggacaggggcaccgacagacctgcctgcgaacaggtgtgagagcagagttgtcactggtagtagggtgctagagaggagaacaccatggggtgactactgagaagtgaaggtggaaaggtgtctgcgttgctcacatggccacttagtcatcctgctctggaaacccccactgcaatatatgatagagggtttcagttcaaagggccttggaaagatcaatctatggagaacaacgtctaaaaatacggaatctttcctgactctgctgtaaatctacgaatcttcggggttttttcacacctgtgcgaatcctttctgttccagcggacaacatggctgatattgagcctcttcgtacatgttcttgcgacagaaacgaggatggtcatcaagcgcccgagagtcaagttacatctgtgcatcaagctgtcgtcgaagggaatatcgagctcctcgaagtgctgattcgggatggagccgacatttctactacaatttcctcccgtgatttcacggcgcttcacctcgctgttcaggggggtaatgaggcggccacacgacttctgattcacgccggagcgaatgtttctgcgcccagttatgacggcgtgacaccattgcacaatgcagctgctggagattcggtcgcggtagctgaattactcgtcaagtctggggctgaaatcaacgcacggaatatcgatcacgaaacaccattgcatgtagtggccttgtttgggaacgaccaaattgcaaagctcctgattgatgttggatccgatatctcagcaacagagtgctacgggaacacagcgctgcacattgctgccggccgtgagcatctcgagatagttcattctcttcttgaggctggagcggacgtgaatgctattaacaacaatggagatcccgtgctacatcatgcaggcagagatgatccaacatgcgttgatctgcttctcagccatggcgcagatgtgtatatgaaaggtgagggaggggacactttcttgcatcgggcagctgaaagctccgcggaactagtgcgtgtcgctcttggagccgatgccaacgtcgaggcaaccaacgatgaaggaaaaaccccattgcattctgcagctgcgtatggcgaaaagcaatcaatccgacttctactcgatgcgggtgcgaatgtgaatgcaaccaccaaaattggcgagaccgcattgcacctaattgctggcgattcttcaatagatgaatctgatgagaaagcaaggctactcattgatgctggtgccgacatcaacgcgaggactgtatcgggacaaagcgcccttgatcttgcaaaagacagcaatgctacagttatacaagtactatgcgaaagatagaaatcaaattggtagaatcatagtctcagtgtcgcaaatgaagtttacactagacaaaaaacatcaagtcacctacggagacgaccacaacgaagcaggattagaatcatgaaatgaaggtagtgcggtgtcgcatgacgtggaagactgtctttgacatgggtggcctgacctatgtctacatctattttcaagcagctagtgctgcttcgggtgtctattcgcttatagtctgactcggcacttgacattcggatataccctcgggtccatgggtatctagagcgctggtgccttggcgttgacaagttccaaggttggcagagttggcaacggggcctgaaagtttaacgatatataactaatcttcgtagctccactagttatgccctgatttatttatttgtaaatttttaaaggtgacatgagcagtcaaaaaataatagattctctctcgaggtcctctccaatcagaacatctttaccaatctttgacaggactagctcgcatgttgtaggcggagctcctcccaggaagagtcatccgctggatcaaccctggaagagccccttgtcctctggcactaccgagatccactctttcatctggcgaatatccgtaatctcggattgcagacgacctgattttgttcttcattttcgcatgcttagagcaaatatctatatgggagattctatcggttttgacttctcataaactacaggttacttctctccaatctcacattgcaagacatgggatatcacaccaggtctacgactacaaaagatacaaaagggtcgatatcacaaaccggatcaacctattcaactaattctgtcgacggaatgggggacaaaaacgaacgaccccatttgctgcaacagtgaaaaatattctccatgggcaaatctccctttcagaacagtccttctcttcaatactgcggaagatccagatttgcaaagaagagacattgaataatgcttggctgcaatttcacacggacgctcggtgtcataaggaagagggaggctcaccaggaagaaggcaagtgaccgcagacaggtcttgctatcccacctgctatgataaacgtatgatccatatgaaaaggcttttcaaagcgacccgaagttgctcgtctcatgtctggcatgctatcaagaacaaagtgctgaatgcggcagatctttgcgacagagatgatgttcttccactttccagctcctgcttcgggtcatcctcgttctcaatcgatctttaattggtctcgctcgtcacggtaaacacaccatgagccataagccccaaggaaagcgatctcaagactttctacatcaaaggtgtctcccgtattgaggctcaggtggtcggggggttgaaattattcaaaagccgtcgagctgaaacggagttgacattcctggtgacagttcccgcgcactatcccttaaaaggcgaactcactacacatctgccttggtgttctatatacccagcaccgtgataatcctgctctgcgcgttgggtgtcatttcaattcgatataaaaatagattgtagttcttgaataggaaccaaattaacgaggaaaggctgttccagggaaacctatataatctcttctttggccatttactacctcttggccagtccaatcactaggaatgaaattcaaggctggtaaaagtggtcgatttcttgagcagatgaaccatcaaaaatgccagtggacctcgggagcttccatctcccgattgacatcactcatgcgaccaatcagcggtgaaaatacctctgtattgtatgtaacagttactatacatatcgaggggaatcgaggctagaattttccacgtgtcttagcgccttctttcttgcctcaggccaaatagatccatacctgtaacgaactaactgactatgtatggatccaccgaggatggatacatctaccacgagactatatagccttgatcttagtacccaatatgtctatacgtgtcaggctctagcaatacatgcttctcatcttcagctacctccttctctcatatcgaggcctttccggctatgtgggaagtaagatcaaagaaacaaaacacgcgttcaagtcactctgtctccacttaaacttggcatgacagctgggatccataactagatacggagtacggagtagcgtcttcagccttgcaaaaagaagaatctttgatttttaacatgcagaatagatcacctgttcacagtaactgttatatcggtgttttcatactaaggatgcgctccaggtgcctctcgtctgcgtatgttgtactgggcttgataccaggatcggcaaatgtattcatctgatctactcattgttctttcgagttcaggattggtcatatgatactaccctgcgcagataatcctgttttatatgaacattcctcgggatctgaagggtaatgaaccttacagtactacctactttactacctacatacagccgcctagagcctctatgacacgctgagctcattcaagtctcgcttttgattcgagtcaagtgcttacgtggcaatcaggtttgtgtctggccaggactttaatatggtatgatatgaaccagtcggaaagcggaaactcgcattcagattgcgtgctgtgtgctgtgtgctgttcaattctttgtttggttgcttgattattgtattgttgtattgcaggatttgattgcggacttccaagttccagtcacttgaaaggcaggattaggtcaagatgaagtcatagtcgagatgtacattgagtgcttcggatatgagtcaagtactaggtagtataaagagatgaccccacgttcttgaagcggggttttccaagtggccgagaatttgttcttgtctcagtcagattccattgtctgtttgtcgctgtctaattatagaatctcgtacttaggattccgttgcgcaacgagagaaaacctgccgggagattcggggtgggatcaaatcacctgtttttaggttggtttggaaggaaaggacgatgtccgagatggtatttttttttgcagtttaaccaatttccgatctcattttcgacggtgttgttgggcgttagtactaccgagtgaaaggcaaccttgcgaccgaggacggacatgagaccacaagacccaaagagaacaaagcaagaatacttcaggccacagcggactaatggctacccaaaaagacaagtcggtcgcaaatcacataaattaagatttaccatttacaatgaaagaagtattgaatcaagaagacagcattaaagcgtcttgtcatgagatgatgcgcgctaaggcatcatgttaaagggagcccccgtaatgtacatgcccatgactgatccatcaatcgatggtgagcagtagcatcgataaaaaagcaaaattgcgaagcaacccagtgccgaaacccattgatattgaaagcaaacccatcatgtatcgccagtagtcatgataaaaagataaaaacaaaccccatgatcgcctttcagaaaaccagctcgttgaaaagaaaaattacgagcgctcgccacggagacggcgggccaactggatgtccttggactggatggtgacacgcttggcgtggatggcgcacaggttggtgtcctcgaagagagagacgaggtaagcctcaacggactcctggagagcaccgatggcagaggactggaagcggagatcggacttgaaatcctgggcgatctcacggaccagacgctggaaggggagcttgcggatcaggagctcagtggacttctggtagcgacggatctcacggagagcgacggtacctggagatgaacgttagaaatgtttcaagtggattcgtcggcgacagcagatatgacttaccgggcttgtaacggtggggcttcttgacacctccggtagaaggagcggccttgcgagcggccttggaagcgagctgcttacggggagccttgccaccagtggacttacctatttgcgacagtcagtaaaatgtctcatgtccaacgcgtgaacgcgtcgcccatcctcaaggcggacacccgactaatcaggtatctgcagtgagatgaataaaatatgatagaagtaatacttacgggcagtctgcttggtacgagccatctttgatgatagacttgatgaaaatgtggttttgttgatgaaagagttggttggtggtggatggatgtaaaagggaagagagatgcgggtgggggaagagtatttgtaggagacgggaggggggggattgatctggaagggagccacgaatcagcgcacggcagccgatcaggatcagtcaggaaactcagcgcgtaggactggggactgcgcagcgtgtagcccagagaccgatttgcggtgagctctgattggccgagctggatcaaagtgctggtactgccaactaagcgagaggtgggccaatgagaacgcaggatcagggagtatagaatgctcaacccttgaattcttgatcttgcacccaacctcctttggatgggggagtcatgcatctgagcgtgctcaccatcatttggaatgtataatcctttctttttcctacaattttacattgttggtggcgggtgataccaggatcaaagaccgaccacggcaaagtcggcgagccaactctggggtctcccggcagatcaaggttggtctgtgatcctgcgctctcattggcggacgcgatccctagcgcgtgatttcccaatcctcgctcattcccgtatcatacaaatatcctctgtccacttccgtttcttttccctcttcttccatcaattccatcgacaacctctcaattaccaacttatctccatcccacttctacaaccccctttttcttctaatccatattcaatatgtctggccgtaagttcttaccccacacttccacttctccaacgcgttctaacgcgtctcatttcaggcggcaagggtggaaagggtctcggcaaaggtggtgccaagcgtcaccgcaagattttgcgtgacaacattcagggaatcaccaagcccgctatccgtcgtctcgcacgtcgtggtggtgtcaagcgtatctccgctatgatctacgaggagacccgcggtgtcctcaagaccttcctcgagggtgtcatccgtgacgctgtcacctacactgagcacgccaagcgcaagactgtcacttctcttgacgttgtctacgctctcaagcgccagggccgtaagtttccacgtatcttcccattctccaacgcgtctctaaccttcctcttcaggtaccctctacggtttcggtggctaaatcatttgttgttttcttttccgggctggttcacggtacgacgggacgttggggtgttctctgatttattttactgcaactgtcatgggtctctgggtttgcttttcatatcactcgattaccactattgcgcgtccatagtgtgcgcttctgagcttttctgtatcataacggcctctacattacggctggcaccatagacatggtgggatcaagcacataagtgcgatccgatacgaatacaatcaattaaaacttgaaataattgatgtctgttctgagtcgatctcgtggtagatgtacctgtacgttcttgtttattggcttctattttgtattttggtgcttgccactctatcgtcggtggcttgatctttcggtcttcgcgttgcttgacgcgttgttttgactgcctgaggctggcctcttttccatgcccaacatcaacccaccatggactatattcgttcgatctctgttattgacctagtgttcctagatcttcaaccttctatatgtctattctatcgtagttcattgtgttgctggttcttcagtacttccatgatgtatgcaggcgaccatatacacttccgtaacaattcatcatgcttttttgtagtttgcattcaattgcgtatgctgtgctttattttcatgttccagctatttgaatggctaactcgtatggtttgaagtatgtgtgttgttggaagagtgtgtgtagacgtagatgcatactgatttacaccgcagatatatatcaaaccaaacattaaaccatagagtctcactccgcgcacacaaaggcattgaactcgaacaaaatacacgcagataataaatacgcaagtaaaatactatataaatacttcaatagagccatatagaccccgcattgtggtgtggcgagcgaaacagatctgttacccaagtcgaagatgaaccccccaaaaaggaagttcaaccttgcttggcgctatgaagcatgacagattcggatctacccacaaccaagcggcaaatgcacatataatcgaaacatgcgacagatggatttaatattcagatttggaatagaaatatatggtgtcctttgaatgtcaggtgatggagactaatttatcatacgaagaccgagttgaaccgcctgaaacggaggtccatactttttttgccacccagctgcatactacaaggtcgagagaaataaatccaccaatacatttgaatagaccaacaggcctgcagataatacaaacatggagtacccaccaagagacgaatatacaacagagcactatatggtcaattagcaaccatccaagctagtataccctctactaataccaccacacagaccgaaggcatcgagcaatcaagaataaattaagtatgtcaataggtattttggagtgagactgggagtgcaatataggtattactccgaccacagtaggacaactatggaagacacatacccgaaccccgatagaccaaacggagtctagctgatatcaccttgctgacctccaactcgcccacccttggtgaagctgacaagacttggtcttctcattccatctattcccacccgcgagatatcgccttggattcaactgtcttaccaacaagctgctttcgcaggagtatgatataagccccaggctaggccgtggtatcaatgattttcccagttcattccatagccacggcattcccagtcggctatcttctggtccatcatcgccacagccaagtcataggaaaactgtggaattgttttcatcaaaccgtctgggagtttcaacggtagagatccctgttcggaccactgcctcatccttcccaacagtatcagattgtccatggtcagtttgattgccatgtcctgcaaccctctatcgctcccgggtgttgagttgtagatctcagtaatcgcatgcgtgaatgtctccaggtttatctgtcgggtcagctcttgattggccttggcctttgagagggacttcagtccttcaatgaacatccggtctgccagggagtacatcaaaatgtgaaacgatagggtgtcagatatgatcgctggcctcttggcttgttcaagaatctccatggcatccgagtccggtgttggtttgtgttgatcgatagagatgtctcgcgctgggcagtgaacttacgcccatagtccaggtggtagagatactcgatcatcccttcaaccaagagcggctcttcttgtagtacgaccctatttgtgaatgcctccttggttatattagtcgaggtgcaacactcatatgttgttctctatcttacctggaacccactgtcacaggctttggcaaagaaatccgatcgtgggcaaagtatgcacttgtgcacggcatattcatcgtctcgacacacaatgatcaggtcactgtatattggctcaacccgtatgctgtgatgacgttgattgtctttctggtctctgtggtagtatctggtacttttttaaggcgtccaaaagctccttggcagggctgaaatcttcattctctccaccttgatatgtagttcccaactgtcagattatcctggcgcaggtactctcgtccttcacatcgacgagacagtggtgagcgttaggtgtgggacgttcagattttattctctgcgttgaggttactgatgaaagtgagtgcagggtgagagatcaagagtgaaggatggtggggtcagctgatgagtaggtctgcattcttttaagagtgagagtatatgtgcaagttgatgtttggttacctggtctacctagccatcccaataaagaacaagaccaggtaagaccataacagccagacgtgctggtgaattgctaaccttttaatttgtctagagcctgcgtgagatcttgaaaaaaaaataaatttctatagttagtgagtggaatgaaaaaaaaagatagacatagcatgtcctggtttcgatccagggtcctattgtgagttagtttgatgtttgtgagtcaaattgggttcggtgaaacgtacctccgggttatgagcccggcgctcttcccctgagctaacatgctgatgacgttcgtgagtcaaattgggttcggtgaaacgtacctccgggttatgagcccggcgctcttcccctgagctaacatgctaggatgttggaaatttatttcacctttgacaacatagaccaagatatacaagagagatcttcctagaaattgttcacttagatatgatgagttctaacttctgtttaaagggctaccggtataatggaactcgtctacaggaactctggtgtctgcaactggacgtcacatgtctattgtttaccctctattccctattcatggaataaagttgccttacagcttactgcctcattgccaagatggcctcctgctcattgctggctcagataatttcagtaactacatgtccttgtgtcaccagggatacagaaaggtctctgcttccggagggtcgatgggtcatcagagacaacgctgaagtgcagtgcatacagatctcgtcgatgccgaataccgatgagcgtaagtctgcgttcaagagtgccgaggggaactggcaccgaatacattccaggagtgtcacgttgcgacccaaagttgcatactgagtgatactggtcgttgccgtgccaataaatatgttctataaatggctctgtatatacccggccacgtgctctctatagtcaacctctggccctctgggagctaatcaatagtcagatatcaacacagtagtaagtcatcccgttcggtaactaaactcacaatattgctctccacccgttgtttgtcctgcaaatatatcatctcgccacctcttcgaagcgttttgctatagccaacgagtgtttccaacttataacttggagtctggatgttttcgatctccttctccagcgatcgggtcttttcttggatgcacgagagctaggctggtcgactgtcagatgctttgccggtgtcaggcttgatgtcttccttgcaccgtaccttattgtatcttggtacaaccccgttggattgaggacatggaagcatgcgattcctaccacatttggttccgtaattcatatataaatataaatagaagtatgacgagccagatcaaggggagtgcttcaattcagcataaccaagacgagagagaaagtacagaagtgggagagggcctgctgatgaacgtatcagactacgcaaggaggaagagaaatgatcaagtcgaaagtgacaatcaagatatatagaagatgataatctagccacacttctgaagttctttaaatagcttcatgattcatcccacaaagctctaaagatctcatcctctagaatctaatagaagcatctctgcaggcgaagtaaagagaccaccgacgcagcaagctgaacgccaagctgcctgcgagaggaaaaaaagagagggaaaaggaatgccaaagagaggtctacaaactgcttggggtaacagtgaatgtgcccaaatgcatcaatagctggccacttctgcaaaatgaaagaatctcttgcttatacatcttatctacccaccaactagctgggatatttcaagggtctatcaaaagcacaatcacaagcaactaacctgtcctggagggtggctcatgggtgcttggtaatcgatggaatcctagagaatctatacggtttgagtatcagacagaaacacgacatagccactattctgtattataatcggagacatgtggcatttcggaatgcagggatagatcgtggttaggttccaaaattctagaataacacgtgtacataggcatcgaagtgaagaatgtgccattccttgctgtcatgagttgcatagccacgactcctttcccagcaaagctccttggagccttctttctaagttttcttgactcaaagtaacgaagcgcatagtataagcatacgcggccagcctcgaggatttaagacagacacgtcatgaatttttgaaggtgccaaggtgtgagtcagaataatcagtcagtgttggtaatccaaaatgccaaaaatctaaatcatcaataacaaaacgcgcaaagcaaaaaaaatcttgcatctgaaaacaggagcatggtcctccgacaatgtcggcgatgcccggaggccggcattccgggacgaaaatagaaagcttccagaagaacgaaaacaaccacgctttaccgaatgcaacactagcggcatgcaaaagccactgaaaattccttctggaacataccagaaataccgaatacgattacctgcagattgtggctgctccaagtgccgtacggtaacagataaccggaaaacttgaacggcgtaacggcagtaccgagaagtggctgtgcagccctagcccagcatccaatcatttacattgaaaaacttttcgctgctgcattagctcgttactaaatatgatcctgcatgacaatctcgcagacccatcgccgagaaacccggattaaggtgctgacataggttttatggtcgggattgcatgccggtgaaaaatttttctccgtggtcgtttgagtcttatgcaggggccctctattggtaatgaacaggatcgatgcctaattgagaaggaggttaatgtacatcgtaaatcatggtgccttcggaaggataatatatccccagatcttatacattccactataatctgagtgggccattggatctggatatttggatcagctgaggttggtttgccacttccccagactcggtaggggccacgtttcggtgcaccctcgaggaatccgccaagaccttccgggttttgtccacatgggaaagggagatcagtcgggtttgggccagactgttcggtaaatacggcagaccccggacccgagttcgcgcgtccagaccgagaaaatggaacctgccggtcggatttatttcgcgctagtggatttcaaagggagatcctcggggggtcacatggcatctggtggactattgctgcggcctctgttcttgcgcctacacgagatccaagctggaaacccggggtttgccggtgctgctcggttcggaggcccttgatctgcaatctgatgcactggcatttagtgcccaagccatgtgcatatgcacggttgaagatgacagcgctagacagaaaatttcgaaatgtaatccgcagtatccgtacataccacgctacccatggtgttccgcgtgctacaaagcccgctaacaacttagcacggagtatcctggagggatccgatcaaatcaaatatgtactctaattttatcgcaacaatttttgagtcaaaggggaaaacatatgattcacatgtgatcgagtcatggaatcatcgacagtactccgtgtagaccggaaaattaaggcaatcaccccacagtaaagagaccatgtgaccatatattagagccggatgggattgttgtgtagctcaggttgggcatttcccgccgagcctgtgagcttagtccaatagccaagcgcttggggaacaaatttgagacatggagagtagcccttagcccaaaaataaagtcaaagtaaattaaaagtaaagtaaataaccggtggtgactcaagatctggggtcagctggtcatcaagtccctatacacaaacaagatccatggaccagtttccaaattcagcttatcatgccatgagatgtacggaggatggtcagctgactatcgcgtctgtcgaactgcgagcggaatccgccgattggtgggtagtggggagacatcgcgagacaatcctagacaatcggagtaagacaatcgcaagttgggagaatattatttcgcagccacaatcctgagttatccgaggtttggaatagttgggtccgagtacgaagaaccaagaggaatgtgctttgcagatgttgtgcaggaatgaatgttgggaccgaaccattggacaccagccacatggcttgatctcgatgtggctagtatttacagaaaccttggaagtgtacggaggaactaagaatggacctcggctgaacaacactccgtccatttcgatgttgtatatttctgggcattcgaggagtaatgactcaccggaaatagcacataaggccgaatcgttagttcccaaccaaaattcagttacgcgaaaatggacaccaaaacaaactaaggtgtggctcagccctagggattcctcctcggcatctccacccccattttccaaattatggccctggtcacccgagtgcaaatcggagctagttctagactatgcgaccgattagttgattttttactgtcttttctaagcgatgtcttgcaaaccttggctgaatactcccggaaatgtcctacagaaatttaaaaaaaagtaatccttattaaatatgcagatctccaacaattcccattgacacccaaaagcccaatgacatagaatatagtatggtggagccgtgtggcttttgtataccgaaagccacaaacttcaccaagggaaagagcagatcagatcagtgggactcggtagaaatgggtgtatgtggtgatacgaatccagtcccgatgcggactagtctcgcacttgggtacaaataaaataataaaaatcacgccaaattggtcaataccgtaaatacttgttcggggtcaccgagctagtgaggtcatctagtacaggcgctctttattaaactccaacttcctcccatctttcaacttcattactcatacccccccccaaatcattattctgactcttgagatcatcatatcaagtaagattcgcttttcctccggccgagtcattctccagaaccaaactcacctcaaccatagtcgtctctattaaagttccagccctctactcttaccattcgatcagcctcccgacgtttccagactcttcgctacctcaagctttgaaccaaagtcgccaaaccagacttcttcaaaagcacggccacaattgatcaggaaatcttaatcggatcttgtgccgtcgggttctataaaagctcgcctttccccggtggcgaacacttacccactttctgacgtcccccaacaccgtgataacataatgcttatgtacccacgtaagggtctcatcaccgatccatacaaccctgagggcatcatcatacaagacgaccaatacccaccggatttctattctgagaacgccttgcactacgatcagtctcgtttgcagtcaccgttccagtgccaccccagtgtacagctctccccgccatcttccgcacctccctcgcctactttctcctctccgaccttctcgacttcttacccgcagacgtctgactgtcagtctttcggggctccttcgatgaccccagcgtcttcatataacccgtcatacgacatccagggttctaattcaccatcgcactacctgtcgcaatatcctcagcaatattatacgcccatgctggtacaacagccgctcgctagtaaccagggttgggatagcaacctgcagttgttgagccctgcgcgcatcccataccccggtgtgcaaaagcgatcctcaccctcggcatcctcgcgctcagctcacgcagggttgcccgccaacaactaccaccgccgctcaaacagcgccaacaagccgctacccaccccggtgcaaacccctctccagaactcattccttgcgactccattccaaagtttcgatccctcctcccaagatggtcacaatgccgaggccgagtctgccatgagaaaagcgatcatggaccaacagaagcagtcaccgcagcaaatgcagaacgactactccctggctccatcggcgtcatcgatgagccataattcaccggtgactccgcagactaccctcgatgaactcgacgatgcatccaagtcgatgaccaatggtgagaatcgaatttctgatattgatttatggatggaccagtacttacatttcgatcctccagaatacaatgccaatggtgccatgtcaattggagtccccaagctgaacagaacgatttccgatatctaccaagacgaattgtacaaccccgccatcatggcagcgcctcagatgtccaagccaatgggacagaatcacctcaacccgcgcaatttcattgccgatcgtcttcaagctgctaaccaaggacacttgtcagctcgttcgcaatcgcctggcggcagacgggatcgctcacctttccgtacttcttccccattcgccggtgatatgagtaacaacgctctccagcagccccagatggccaccagcgtccccatgggacagaacgcaatgaatgggttgaacggaatgaacatggaccagaccacaactggagatatcaagactatgtcccccaaggatgcggttttggatttccaagacaacgatgattccatgcctcctctgttccctccgggtcaggctgatttcaacctgggtgatgcgcttggcttgcgccgcgatactggcccaatgcgaccgatggaagcattccctcagtattcgacacctagcatggcccagccacagttcgcattctctgaacctcagatgcatcgccctcagaacctcttgccgcagggtaccgatttcccttcgctcccagcagtggaatctaccgagagctcgcctccaagtcaaatgaatatgtccattacagagagcattcctcgtcccgacaacacgtcttcggatgcgggcacctacacttgcacatatcacaactgcacagaccgcttcgactctccctctagactccagcgacataagcgcgaggcgcaccgacaaactacaccgggcggccaccttgtcagccgcgatacctcgctccgcaactcccaggctggcccgcacaagtgcgaacgcatcaacccgtctacaggcaaagcatgcaattctatcttctcccggccttacgatcttacacggcacgagcatacgattcacactgctggaaagcagaaggtgcgctgccacatctgtaacgaggacaagaccttcagccgaaacgatgctttgacaagacgtaagttttccccttttcgctttcaccccttaagttgatcatacactaattacattaattacagatatgcgagtggttcatcccgagatcgactggccaggcaagcagcgcagaaggagagactgagagcgccttccacgtcatagtcaccggatcggcatgccgaacgtcatcggtggacccatggtggacccactgggctccaccaaaaatccggggcttcgtcatcatgacgattcagctccctaattctcatgaactgtatcactatgcggcttccgattttattatgtgtacgattttacgttgatgatttgtttacatgcggttccccttttagcattggtcggtgtgtttttttcattttgcgtgttttctccctctattttgtgtctatgccatttggccgggaaaacaaacgggttcggtgttgtacatttctgttgtacatggtgttgctgcattttgaccccagtacagtgtgtccctcttgtactatagtacattcctctaaaaaaaaaatgtatattagcttggatatgacatgaatttggaaatgatacatatgtatatcactctccacactccctccgcactactccacactccactgtaatcgtgaaacaccctcttactttgagataatcaagggatagacttgaatcctcgtacccacttgcatcaaacctgcatgtttacccacatatgccagccataactagggactgttttaacaatctatgcatgtgttgcagtcttgcagatagatgtacattgtctgaatgtatcttgtgtatcgtagaccgattaaagttgacaaaaacaccaatgcagcacgagcaaagttttgaacattgcatgttgtatattgcaattaattaacatcccctacggatgagtcccgattcgcgctgatcatatattgtcctccgtactccgctccgtactctccgtattgcatcaacaatagaaattacctacattacctatcaacacattgtacattgtacactgtaccttcaatgccaacaagaagttagaacaagccggacgtgcaagtaatccatataggccaagagtatgatcccaccattgcgtagccggttcccagaaagccttggaacaatcccgcgcgcatccaaactctggcccgataagcgatttaccaccattctggtacccggtactggtgggatttctggtttgggttttcgagtgtcgacgtacaggaattgcacaagcacaattctagccccttcaggattctggtcccatcttttattgatggagttggtattttgaatgcatatggagtttcataccgatgtgcctccgggagtgtcatgccatatctcctatcttttactgggtgtgaatgttgctgtcattatctttggttgttatcgtcattaatgtcaattgaagctattcgagcgttttgtacgtatttgaaactatcgatctgcaattgtgggtatctatcttaacgtttaccatataccaataataagccgtataggtatatttacgttgtgcaccctgaaaatgatagacaagaaatgataaacagggtgatatacatcggtgggtccatggcttgatagctgtgggtcttcaataccgttgtgtattggggggtggggaggtggagaggtggaacgatggtgggtgtgtggctgaggacgaacttctgttttttaacgtaatctgccgtacaatcggcgttcctcatttattacataggagttcgtatatcggtggtgtgatagatggcttggcggcttattttgacttcagttagttcttttgcgatgcaccggtactatatcccttgcgtggtcgcatcatcgagggagtcatatgagatgtgaaacgtgagtcgtattactcggtaccgcccggcagtattgctatctcaactctccctggacttcaaagataacggcctatgctctgtctcatgcatgtgcatgctcgactgcatattttaatacgagaaaaggcgcctatatcactctacacgtgaacgtgctctgatcggctatagacaagtatgtatgaagcattacacagttcagtgcgacctttggtgtattccaacgatatcataacaactctgactctgcatccctcgctcgcatccggagctgagtatctccccatggaggaattttttgataaaatccccattatttccttaatcgttgcggcatctggcgtccacgtcaagctaccccagctccctggcccttcccagtcatttaatacaattcttgttgtgtctatcgaatacattttctcatcactgagtcgacgccttcaggccccatcgctgcctgatcatccggaaatatttcggatcgcttgttgctttttcaactgattctcgatcctgatgcaccattctctacattgaccaaatcccttattgacatacagactcgtcgtatcctccatcattccaattttcgcggagtctgttttttgctctacctacttcaacttaacccacccgtctcattctagtggcctgaggatctgtttccctatgatcctcgagaccttgaaatgtctacgggatacagatattgcaggtgcctaatggagggatatgacgaatgtctctgcagattttgtaatcgatgtgggagttttggtcatactgccatttactgcagagggaaatcccatgggggacgaagtggagggtatctgagatgctcacgccctacaaacgtgacgccgatgaatgatcttgattttattgacgatcatagtaaggtatgtgcgctgttattctaacgcctactcttcattacggtgctgactgaaaagatcccgtctcaggattcgcccaaagcgctatgcatcgaaaaaggaccgctcgccacaaagatcaccacccaatgaaattccaaatgccaaacgacgaaactggactgaggtggccggcattctaaataagactttgaacctaggacccgttgatcggacctccatcctagagcatttgatttcaaatgttcgcctcgaaatgagcgaaaggtactcctctgtgctagaggagttcgatattgctagaatactcgaagacagtctgagcccagtcgtgaagaatatttgtgaaaagggcaaattcgacctgatcaggcaagtttgacctcgaaatgcagagaaaagttgctaataaaaccttcatggtctcttggaaattggacaggatccagaaacgaaaaaagaagctggtgtatatcttcatattctatggagagaggatgaaacgacgaaacggttttggctttacgtcggacaagcatgtgtgctgtgtcttgaggatccggaaacataaagaccctagacatcgctggaagaatagaggtctacactacgcagtgtgggactctgccgtggatatgaaatcagcctttgtcactttggctattctcgacgccccattttccactaaaacgcagctagttctcaacctagcagagatgtggatgtgcctaaaattccaaacactgacttcccttcacctaggctcctggttgccgaaaagcacaaacgctatatggtcgggtaatcatctcaatgttgcattgccattatggcaaggattcactgatactcaagagaacaaagatatcaccgacgcaattggcggcagatcaacctttcaacaataccttacatctgaggattcagttattcgggcatgggcggaacaaaccagggatgcgttcaacgacatacgaaactcacctgaccccgggatcagaaattactggtgggatcttcacaaagagcgtatccttaaggcacaggacacctggggtaaaaagaaagctagcatggctaagcagtacctcgaaggggccaaagctctcgttacattgcattccggaaatcatggaaaccatcaaactgaggttagagctggtagtttcaggttcactgtttcataaacacttgggcttgatctccatgacggtgacgaagttattctccaatatcatctaaccccgactccacacccacacgcttattctctttcggcattgaaaacagatcctgctacccgcttgggggtttctatccgcagtcaagatagccatggaggttttcattgctggctaaaggcggctggagagtgcaattcacgaaaaatgaacacactcgtggacactctggaaggctattctgcagaagaaagccagagattcaagagacgctggtttgttactgggtctttgaatagaccaaatagtgatattataggaagaaataggtacacttgatattctaaaactataattttcagagttcagaaaagttgcgaagagccaacggattcttagtcggatccaattttggtatttcaaagtcagtgtaggatatccctttatatcgtccgttgttttcccaagagatcccatgttgcagaaattaaccagtcagactaacttatatagctgataacaatgacttgatgaggcaagtgacgttgagtatgtagagttagaacatcaaagaaggaatctccatgacacgtgcaattcagtggagtttcttggcgcgaaaaaagtacagatttgaagcagcgcactaataaaaaagataagagaaaaaaaaaagatagacatagcatgtcctggtttcgatccagggtcctattgtgagttagtttgatgtttgtgagtcaaattgggttcggtgaaacgtacctccgggttatgagcccggcgctcttcccctgagctaacatgctgattggtggaagatatatgcctgacgttcgtgagtcaaattgggttcggtgaaacgtacctccgggttatgagcccggcgctcttcccctgagctaacatgctgattggtggaagatatatgccttgggtaaaatatgtatcatgttttcgagaatttcgagttctatatatagtagctactagtacatatgttatacaaaagtacctcatcatctaataatttatggggtactagcttcacttttagaatatattgactagtactctgtagataattcttactactcaattagacttacacaggttattcacctttcgtaaacatttattattatttttatatctcaaagtagggatatatgattttcgcgggtgctggattacatcccatgagcatgttagctcaggggaagagcgccgggctcataacccggaggtacgtttcaccgaacccaatttgactcacgaacgtcannnnnnnnnnnnnnnnnnnnnnnnnnnnnnnnnnnnnnnnnnnnnnnnnnnnnnnnnnnnnnnnnnnnnnnnnnnnnnnnnnnnnnnnnnnnnnnnnnnnnnnnnnnnnnnnnnnnnnnnnnnnnnnnnnnnnnnnnnnnnnnnnnnnnnnnnnnnnnnnnnnnnnnnnnnnnnnnnnnnnnnnnnnnnnnnnnnnnnnnnnnnnnnnnnnnnnnnnnnnnnnnnnnnnnnnnnnnnnnnnnnnnnnnnnnnnnnnnnnnnnnnnnnnnnnnnnnnnnnnnnnnnnnnnnnnnnnnnnnnnnnnnnnnnnnnnnnnnnnnnnnnnnnnnnnnnnnnnnnnnnnnnnnnnnnnnnnnnnnnnnnnnnnnnnnnnnnnnnnnnnnnnnnnnnnnnnnnnnnnnnnnnnnnnnnnnnnnnnnnnnnnnnnnnnnnnnnnnnnnnnnnnnnnnnnnnnnnnnnnnnnnnnnnnnnnnnnnnnnnnnnnnnnnnnnnnnnnnnnnnnnnnnnnnnnnnnnnnnnnnnnnnnnnnnnnnnnnnnnnnnnnnnnnnnnnnnnnnnnnnnnnnnnnnnnnnnnnnnnnnnnnnnnnnnnnnnnnnnnnnnnnnnnnnnnnnnnnnnnnnnnnnnnnnnnnnnnnnnnnnnnnnnnnnnnnnnnnnnnnnnnnnnnnnnnnnnnnnnnnnnnnnnnnnnnnnnnnnnnnnnnnnnnnnnnnnnnnnnnnnnnnnnnnnnnnnnnnnnnnnnnnnnnnnnnnnnnnnnnnnnnnnnnnnnnnnnnnnnnnnnnnnnnnnnnnnnnnnnnnnnnnnnnnnnnnnnnnnnnnnnnnnnnnnnnnnnnnnnnnnnnnnnnnnnnnnnnnnnnnnnnnnnnnnnnnnnnnnnnnnnnnnnnnnnnnnnnnnnnnnnnnnnnnnnnnnnnnnnnnnnnnnnnnnnnnnnnnnnnnnnnnnnnnnnnnnnnnnnnnnnnnnnnnnnnnnnnnnnnnnnnnnnnnnnnnnnnnnnnnnnnnnnnnnnnnnnnnnnnnnnnnnnnnnnnnnnnnnnnnnnnnnnnnnnnnnnnnnnnnnnnnnnnnnnnnnnnnnnnnnnnnnnnnnnnnnnnnnnnnnnnnnnnnnnnnnnnnnnnnnnnnnnnnnnnnnnnnnnnnnnnnnnnnnnnnnnnnnnnnnnnnnnnnnnnnnnnnnnnnnnnnnnnnnnnnnnnnnnnnnnnnnnnnnnnnnnnnnnnnnnnnnnnnnnnnnnnnnnnnnnnnnnnnnnnnnnnnnnnnnnnnnnnnnnnnnnnnnnnnnnnnnnnnnnnnnnnnnnnnnnnnnnnnnnnnnnnnnnnnnnnnnnnnnnnnnnnnnnnnnnnnnnnnnnnnnnnnnnnnnnnnnnnnnnnnnnnnnnnnnnnnnnnnnnnnnnnnnnnnnnnnnnnnnnnnnnnnnnnnnnnnnnnnnnnnnnnnnnnnnnnnnnnnnnnnnnnnnnnnnnnnnnnnnnnnnnnnnnnnnnnnnnnnnnnnnnnnnnnnnnnnnnnnnnnnnnnnnnnnnnnnnnnnnnnnnnnnnnnnnnnnnnnnnnnnnnnnnnnnnnnnnnnnnnnnnnnnnnnnnnnnnnnnnnnnnnnnnnnnnnnnnnnnnnnnnnnnnnnnnnnnnnnnnnnnnnnnnnnnnnnnnnnnnnnnnnnnnnnnnnnnnnnnnnnnnnnnnnnnnnnnnnnnnnnnnnnnnnnnnnnnnnnnnnnnnnnnnnnnnnntgacgttcgtgagtcaaattgggttcggtgaaacgtacctccgggttatgagcccggcgctcttcccctgagctaacatgctcatgggatgtaatccagcacccgcgaaaatcatatatccctactttgagatataaaaataataataaatgtttacgaaaggtgaataacctgtgtaagtctaattgagtagtaagaattatctacagagtactagtcaatatattctaaaagtgaagctagtaccccataaattattagatgatgaggtacttttgtataacatatgtactagtagctactatatatagaactcgaaattctcgaaaacatgatacatattttacccaaggcatatatcttccaccaatcagcatgttagctcaggggaagagcgccgggctcataacccggaggtacgtttcaccgaacccaatttgactcacaaacatcaaactaactcacaataggaccctggatcgaaaccaggacatgctatgtctatcttttttttttttgcgttcttcgctttcacggtaaatttgcggtatcatataggattctacattgactgtagctcaagccattgcttgcatgtcttcttttggactttgtatagctttcttcaggtctctcctaaataattaaacctttatatggaggatgtgctggatatatatcacctcttaccttgttggtatctagatgtacttttgtaattgtttcatgaatcgcattaaaaccccaactattcaaacttcatatcagcagaggtattgcgatatcctctaaattactgatagaaaacagtcccaatattttcccaagtttggtaatagccctacatattggtccccatgccaacttactctgtttaattgggtactctcgttttgatcgagtacaagcaggcctatctcgatcacacaattcattattctcaaacacaagagtttcatgctgtggtgcaacttcccgctgcctcaggccatcaccgacatcaccagctctacacgacacttagacacagtggaagtgcttgatttacgtgctcctacaatcaacgcatacagtgttacactctgggcttcatatcctcgactcaaagttataatttaaagacttcaacccatcgccgatcatcctgggggagcggaactccaaagtgggggccaaagagcgggagtctcctatctggcatttatatccatcaaagaaacataaatcaactccaatcctgttgatttccccagcataaataagactctctgccttcataaccccgaacatccccaaacaagcaaattagccagtgtcggggaaaaaagaaaagaaggaaaaaaaagagggtcactcagccaacctgaaacgaaccacaagcccacaccaacccaacccaacaaaccaccctatacagacaaaatgggccaaaaggcctccgtcccacaaccgggcgcgcaaattcaagtcatcggcgccgggctaccacgcaccgggacctcatcattcagcgaagcgctagaaatcctcctaaacggaccggtgtaccactgcggcacgcaaatatcgaaaggcccacctggagagataaaaagctggatgccaattctgcaaaactggctcaaaaaagacgacagcgcaaggcgggaaaatatgctcaccctcctgcgccaccaattggccggctacgtcgccatcaccgactccccaggctccgagctcgtcccggaactcatggagctgtacccggatgccaaggtcgtctgcaccacccgcgaccccgtctcatgggagaagagtatgctccacgtgcagagtttgactggcgtttggtttgcgcgtgctgtcctgctcccgctggacgggttgagacatttcatcccgtatgggtatttgctggcggcgctgtgggagaggctttatggtggtgttgctggtcagcatggtcgggagacttatgcgagccatattgcttggctgaaggaggtcgtgcctgcggataggttggttttctttgatgttaaggatggatgggggccgttgtgcgaggctctgagtttggaggttccagttggggtgccgtttccccgtatcaatgattccgaggctattgagaggtctattaatcatcatttacggaggggtcttgcgcactgggcttgcatatttgctgtgtttggtgttggggtggcggctttccgcatgtggaggtgagacgagggcgagacaattgcatacatgtgattgaaggataagaggtgatcatttggttgcggagttggtattttgaattgtgcgattttggaaactctttggttggtcaaactccaacattcagcgacttgcatacattggattatgttggtttcttcaggcccaggtggagcatcaggcaaaaactcactacgatagatcggcttatacagtcatttacatagccatttacacagaataagatatatatgtcctttggaacatgcattacaatatatgaaacgaaataaattgcctaaatgtcacaaataaaattttgtacgccaacttttgaactcgtaagcataaatccgacattattaaccagttcgctcgagcgatgccgagctttcccttccactatcatttatttcaaaggtagtttcgatcttcgtgtgagtaaagatcctgtttttggggataatacgctccttgctggagttggccccgccaatgttgttacccatgggatcatcgtccttgctgtcgaccgtgaacatagtgaggctgttgggatccctggccttggagaatctagatgcataccacggagaagtgttgttgcttgaccatgggttatacttattcccactgctgtattcgccgatgaagcgaggcacgaagtgggatgcaatcgccttgaatgacgggattgaggcagcgaatatgccgacgttggtttcgataacagaccaatacatggaaccgctgatgacgtaggtggagtccttcgagctaagcatggcaggaatgtaggtaattcgaatgatcgaggagatgcaagcgctgtagattaatccgttagcaagcatccaggcggaggtacttgggtagacttacaaaagaccaagacagaggataaatgccaggacaaacttctgtttctgaggcatctggagatggaagattaccttgacgggcaaggtataagtcatgagatcggtgacgatgttcaaggcggcgttgcatagatagaaaatgttgatgttgacgcattttccagttccagttccagtccaggccatgctaatgggtcgacattggaatgcagccacgagaacgaatgagatggcttgtgctgcgattactcccatcataacccaggataggcgagtgagatagcgatctccgaggcgagtatagaaccacaggacggaggttttgacgaatccaagtgttgcgagatagaacattgagctcagccagacagcctggggaaggttagaaatgcaatgctgtacaatttcgggatacgcatccttacaaaagaatagtcgacgatcttggtctggtcgacatccgcaaaatgttttccaagtccatgtttgaccgctaattgatattagttgctgcaaaaagtcgtaggaaaagctagaacataccgatgattacgacagctataaatgcccatgacaacgcctatttccattagtatgatattgtaatgacaatgtcaatgtctcttacacaagcgcaaataatgaggtctggaagatgtcagtatggtgttggtaaaatagatcaagcataatctacctacagtcgtcaacgcccatttggcccaagacataaaggcgtgcgaagagacgaagagccaacacaacgaaggtcaaggtggcaaaggccacacagacgcccacgaccatagggccttgagaaccattggcaccagccatgacgaggaatatggatgatacaagcagaaataaaaagagagagaaaagaccgtgagttgacgtaaagaaggaattagactagatgaatagtatagatagttgtttcacatatcccatcgagaacgaatgatcaaatgattagtgtaagcataaacgaaaaaaaaaagaaagaatgattagcggtaccccagcttatgggctatactacacatatttatccctaatgcccctggtactagtttgaataaaagtctgcgcacactacggatgtgaatcctgcatggatctagtagccttggagatccactgtataccataaaaaaagccacaaaagaagaaaacatcgtaacacttctgaagccacacgagacagactatccccacaactaaagacattcatcgacctattcgggctaaaatacgcatgccatttatgggtaggctcccagtctcaagccacttacgaaaaacaggaagagccctaaggtgggttttctagcgctgtgatttgtcactcagatatctctagttgtaggtgcaactgaatcatgctttggcaaatgaagcagcaatcgtttataggaacctttgttccgggacaatgagtcattgtgtataggcagtaaagacatacacctgatcgagttggattggctcgaacaagtatcgtgggtcgacacatttgtctcgaagacgattattatcattttctaattattggaaagttcaccaagtagaaaatccttatagccaataaggaagcaggaaaaacatggaagaatagaaaacgagagtccgtgagttcccgccgaggtggagagatctgatttatttttgttctcatgcgatcgagatgttcgatgctgatcaatatcttgatactaatattaaatagtaactagtatgtcctagagtgaatacgttatacggagtgatattgtgcttgtatagtcccgataaccctaattccgacggacaaaagcaactagaacatagcaaacccagcggaacattgcttaaaaatttagacgaatcctgccagatattaataatgtagaggaggagctcaccgatctaaacgattcagaacccggggagctcttgtctatgcgcctaattacggaatatgacggagtaacggacgatggatggcccatagtttgaagcctcacctcgatctggacgactccagttgccttccgagcccgttctgagcggagagtgggtcgtttaataacttcttattaagcgagattggctaggttaactagttaactagaatgtgaagcatcggtgcatctcatatgacatcaaaaacctacactgcacattcttcaaggtacaaagtgtgaggaaatggaactttaatagttactgcgtacatatcctatgttgtacatatcaagagccttttcgcaaatattcttagagatcgactagcaattttttatcctactagaagtgcttccaagccaacaggattaagaagcacgatactccgtatactccgtgcaaccatagaaattatccgctttagcaaatagttgatcactagggcttggtctgtctcatacaataaacctattttatcttttcccctttttgggaaaccagtggagaatcaaaagtcggagtctaactcgttccgagtctcctaccgcgttggtgccctgactagtcaacgatattaattccctcatctctaaatgttgaaactaggtaccttttgtatgcagatgccatacgaaaggtacaaccatagaaaagctacgatatcgatttccccaacactcaactaactcaaaaataatggaacatactccgattggaccgttcatggaaaaacactatacatatagattatatggcacgatcttttactttgtgtagttgtggttcgaatcctttgtgacttttgtatggaattccctacaaaagatacctacttctggaatttattggaattatcgtgacagccgagatattccgatttcctgccacgattgttgtaatccgggttgatgaaaatttcgcacgagagccatcatctgcaactttatttagtcgactccatatgaggacagagaccagtgagaaacactggctatctgtagtggagaacgccagcctcccgctccaccttagtgcgatgtactccgtcattccggtctggcccagtgcaaatgaccctagagaaccttgaaaggctttgactcacacccggtgagaaactgccgagcaactaatcccctgcgctggttgttttaaatgttcgtgggcaacggcgcctctgaacggcgcgcaccgaacccgcacggccccttgacagttggcaacgtctttctccatattcagaatatctttactattctaggctactaggcacatcacgacgggatgtgtgttttccaggaataaccgcaacagtggatcagcccaaagacgcgattccttagcaagcggagtcgcaatccttcgacgatttaccgatgcccttagcgcaaggactagcaccaagggggccagatgcacgagctgtcacacgccgaggatattccaaccgttgagcccaggtttggtctaggcttgattccaggcaaataccagcatcgtcaggtgttgttagctcgacatagccttggccaatgacctttgggcccttactactacaacgaatatgctgtttagtgcgaatattcatccgcggtccttcatttccggaggggttacttcctccctctgtcaaaaagacatgtctgcgtcctccatgcatctgcatccctaatccgccatgggtcttgcagaaaatgtcctgtcactggtgacggtgaccaatgtcattttgagtcttgtggcctatgtcacgctcaagtttgcctggcaagttatttactatcgcttctttagtccgctcgcgaaattccccggtcctttctggggctctgtaactcgtctctggatcgcatggcataatctgcaggagaccgaggtaccaactgtttatgcacttgctaagaaatatggttggtcttgattatatatccgaaagaaatggctttctaacaagtggacatcttaggccctgttgttcggatcaccccaacattgttgctggtcagcgatcatgaaaagctcccggaagtctaccaccgcaatgcagacaagaccggacactacattaccggaagctttggtgagaccgagtctctgttcaacatgaggtctcataagacccatgccgtgttcagaaagcacgttgccggaccggtatgacgatatgcgagttcaattgcagatatcaaaaaatgaccctcaaaatagtacagtttcagcaacatcaaacaaatggagccactggttgatgtgcgcatcaccgaatggaccaccaggctcaacgaaaagttcgcgaagagcggcgaagccttcgacttcgcctggtgggcagtgtaagcagcgcacgcgccaaatgaaacaatgctccgactaacaaaacaaccagctacatggcctacgacatcatcagcgaaattggcttcggcgagcccttcggcttcatcgaaaaaggcgaagacatcggcggcctaatccaaggcttccacgacggcctcccagccttcggtctcctagcccgcctgcaccccttcacctcatgggtaaaaaccaccttcttgaaaaagtacctcgtagccaaaccagaagacaactccggcatcggcgtgctaatgcgtttccgcgaccggctcatcgaccagcgcatcaaggagatcgaaaacggcaagaaaaccgaccgcacagacctgctccagactttcctcgatgctctcacagaagacggaaagcccctcgatctggagtacatccgcgccgaggtcctgctagtcctgctcgctggcgctgacacaaccggcaccgccttccaggccatggtgcagtttctcatgacccacccgcaggcgtacgagcgtatgatggcggaaatcgataactccgcccgcaagggtctcatctccgatatgccacagtacaatgaggtcctggagcacctgcctttctatgttggctgtgtgaaggagactatgcgtctgtgtccgtctgcgccgaatatcttcccccgctatgtccctgagccggggctcgatctttatggtcgctttgcaccggcgggcacggaggttacctgtaacccgtacctggtgcatcgggatccgaggctttatggggatgatgccgaggagtttaagccggagaggtggttggatgctgagaaggcgaagttgtataataagtataacttttcgttcgggtatgggtcgcgtgtttgtttagggagggatattgctatgatggagttgttcaagggtcctttgcaggtgagtctttttccggctgtgctacgtgctatcctggggcgagtgctgatttatcgtctagttcttccgtcaatacaagccggagactgtaaagggtaagcccgaggctaagctcatgaccaaaggtggtattagctactggagagacgtgtggttgaccatctctccccggtcagaggtgaaggccgagggaaggcttgattgaaggttgggtctacatacagacagaccggaagataatgccggtctaaaaaacgctacattccatttgcacaggatacagctcaaaaattttcatttctcaaaaattcaatatcaatttcccggttctgagtcattgccatccatatacctatattgtgtttctctattgtagtgtcgcgcagaaccaaagcatgcgatcgttctcatttgcccacgcggcattcttgaccttggccagttcctcgccgatatatagccccgcctcgacgctccatcgcgtccccgtcgcctgacccacatcgtaccagaagcccttgatcgtctcgacattatgtcggtagttagaacctgccgcgacgtctttcatcgcataggatccgcccagcgtattccctaactgacgcgcgacgatcatcaagctgggtcgacggcgacagagacggaccatatgcgtcgcgacgcggacctgctggtcatagtcccacaggtggaagagcgagctcgcaaagacgacgtcgattttcccggctaacttctggaaaatcgggctcgcgtggtccagacagtcgggcgagctcaggtctcccacggcgaaagtggcgttgagacggtctcgatcgcggaagagctggtatccgagatcgataaacggttgctctatatcacatccgtagagctgctcgcccgggatgccctggtcggcaaggaaacggatctcctgaccgaaacagcagccggcctcgaggattccggcggttggatcgtcgcggagacgggccagtatgcgctggtagactggatggtggggtagctggaaggtgaggaagcgtaactggccgatacatggatagtggaagattgagtaggcttcgtcgcgctacggattggagatattaatgattgttagctatttgagagactcaaaaaaaaaaaaaaaacaagggaaaagcaagttgccgcgtacgagcttcaagacgtgcgggaggatttcgtccggatggaagccgctgtagctttctaacagcctctgggcctcggggttgatgctctggacctcctgctgataccattcgggtttcttctcggaccccatgattcttcttcgaaggagggagtaggtatcacaggggatgatgatagatgaataaatgtactgctatcatggctgccttttgtagtgagaggcacgccttaagagacctggtcgcagatcattgccgagtatcgcaggtggccatgcagtatggactagatctcactgttccttcggagatttagcggttgaaacaagcctgtaggctgatttcgctccccacatagcgatccttgcctgtgctcgctaatacagccgtttctgacctttaaagcagtcattgtcggtgtcaatcccactggtcctcgtattctagttgtcaacgggggtctaagatcaggcaaaaaccaggcattcaggcattaaatgcaggcatgcgaccttacgcgctataactacaccgtcgtaacccccttaatacagaacatggcctcctggtagattacttgcatgcctatgaatgaatctttgcgttaccgcatttacctacgcgtcgaacctgcccaagtctttctctgcactcaacatcatgatgcgagccgtgcgaaacgcctggactattgccgcccatcggggtttcactacgtctctaccctccattccttgttaccgaattccccgacggtctagtccgagagccatagttgtgtcgcatcgaacaattatgtcgccgccgcagtggacatgcaccccgaaagtgttccctacctcgggactcgaattgcttgaccaatccatcgagcttgaggaagagacactgtcggattatcaaccggagaattattatcccgtcaaccagggcgaagtattcaatggtcggtatcaaacaattgccaaaataggatacggagtaacctctacagtttggcttgctgtaggtgtggtgggttcgcttcagcccaaccagatgatatggttctgatagcattccttgaaccagtgcatcaacatatgttgttctaaaggtttacgtaacaggctaaaaccaggcctgcgagcgagagctgcacatctacgagcacatgaacctggtggaaacaaaccatcctggcagaaacttcgttcgcaaacttatcgaccatttctatatacagggtcctcatggccgtcatatctgttttgttcacgagcctctcggaacgagtacagatattctagtgaagatgttctccgggcacaaaatgagccttgatgagatgaagcccggtatccgacagctacttatcgcattagacttcttgcactcggagtgccatatcatcaatactggtaatgatcaatccgcctgacgacttcatatcataggcctaacactgttacagatattcagctgaagaacttactacttcctggaccggagacaagcgttcttacccgattcgaggaagctgaagttgcagatccatcacctagaaaaatgctcaaaaaccgaacaatctacaagagcttaggtttccttccaaaaggtgggctgccgatcctcgctgattttggggaaggattgggcgacgaaggacatagtgatgatatcatgccaaacgcttatagagctcctgaagtgatgttgagatcgaactggggttattaggtggatatatgaaatgttgtcatggtcgtgagtggaagattctaacctttttaacgagaaaatgctaaaattttatatttaggcctgggacattgttagccctcgcacccttatcagtggcaaaaatccagatggcgtctttgatgaccgagttcatatggcggaactggttgccttgctaggccctccgccacctgtattccgggaacagagacaccccagttcggtctactgggatgagtcaggcaattgaaaggaagtagtcccaattccagacatcacttttgagaggcttgctgagaaggttgaagggaaagacagagaagggttctggttcttgtggtggcttcggatggccttgcagtgaaaccccgaggaccgggcgacggctttgaaactcttatacgacgagtggctgatggaggggctgtgatgaaagggctgggggaatgaggcagggatgagcaaatagtgggtgaacagaagaaaggtggcagttcgatatgtaccctactcaaccgctgcataagtattccaaagctatggaataatagccttatgctattaatgatattacaggaaccatcatgaattacacaagcgaaaaaatgtcactcaaatggcgctatacctgaagtacatagtttaaacaggtgtgcaaatagggattctcagctaaaacatcaaatagatctgtgggttgaggatgtgccagcctccatgtaagacaaaaactggtgtagcctggcatcgggcctcagtctgcatcgcagagctgtacacaagaaagtcgccatatgtgatagttgtagctgggtccttgagtagacagagctcattgttccagatattgattgtatcgaatcgaggcagatactgcagctcccgaaacatcatgataagcgcggtgtatggggggatgtttccctggagttctctgttcactttgtagcgatatgccaaggtgttgatgaattcctctgggccgttgaactcagagaggctggtaggacggagacattgctcgacagcagtaaaccattcgtcaaaaccgcctctgtctttaagaggtgcgaggggacagaatatgccgaaagtgcctagctcgggcagatgggttggctgatcctcatcggcagggttctccaaacaagcttcatcccagtcgcgcttgtttcgtgcgcctgggttagtttttgtgccaggtgcacctgtggcttgagcttcgctgtcactcattgtgcatcagaagtgttgttttagagaagtttctcgaaaggtggaaaggcggatgagcttacagttcggtaagacaaggggtggaaaccaggggagatgatagatggttgatggaagaagggaataagatacgaaagagaataagaaggttaaaaagggagagatgaccttagaagagaagacaagtgtcgaggaaggtatggacgtgtgcatatgaagacagagagcaagcgcctatgtagtgcacttaggatggtgaatagccaacctaccacgcagttgagatcaaaacaaggactgatcctgtctctaagatgccatgaatgacaacaatatatctacagatgttctttaactgctcacctagttgatcttccttcctctctccatggtgtctttccatcttgccttctctacacaaagcgtaatatggagtatgatacaatcaaatggaatatgtaaatgagagctactgtatgaacacgaaaaacaagatgtaagccaggacaaattttgttgaatgcttttagtaacccgacacccaccgctagtacattggaacatggtatggcgtcaaatatggcagatagagagaaaatcccgagacattcaggatgcgttcatgatcattcagcagtacccatgacggcatcctaaacaaagacagtgaatgttagtaacggagctagagagtatgggtatatcaaggtgtttgcttactcttgcctcatggtacaaaggagtgataccggtccagtgaacaaactggtgcacaccctgtccaacaagagcctccagtccagggatggtactccaacccgcatcagatgccagctgcatcaaggcggtgacagtaggcttgtaggccatctcaagaagaacacggtgcttgccagcgtcgggagacttgccgatgagagtgccatcgacctcctgagcgcgctcgaacatgtggcagagcgtctcgcgcatggcagggtcgatgggacggtcggcggggatcgtgccaatagcgacccggggaacggtgtcaagctgggcctggttgtctacaacgcggatgttgtaggtggtcgggaaggtcgagaccataccctcgagcttgctggcgtcacggcccaccacgtagattggggagaagtgcatgtggtggagggcgaagatggcagcgcgggcagtaccaccgccgccgatgacaacagcactctcgttgccgctggaaccgtaaattcctgtattccgcatgcatcggatcataccttgccaatcggtgttgtaaccaatcagacgagggggcttgtcgccgttggggacgggcacaatggtgttgacggcgccgataatttcagcttcctgagcgacttcgtcgagcaggggcatgatatccaatttaagggggattgtcaccgaggcgccaccgaagtcaggggcgcggatgaactccttgaggtcttcgacgttggcagtctccagacgagagtactcgtggggtagacccattttggcgaagagggtattgtgaagagcgggagaccgcgagccggagacagggaaaccgcagatagcgaacttcttggccttgatctcacccatcagggaaagaccacgacgaatctctgcagcggacagctgaccaggtgccgccttgaaaggaaggctggggtgagacacaggggtcatgaagccgttcaggatacggctgagctggccactgtcgcccatgttgatcgcaattagcggcacgtcgtgggcttcttcagcccgtgtcttgaacttccgaagggcagtgttatcatcaagggtattggcaacaccgacgagcttgatgatatcgccgtactcaagagcacggttgtaggattgcatccaggacatgttggcccacgatagagtgcccttgggatcatggtgcgaggcgatgatcttagagtaacccttcatctcagtaacggcacggagcattgcatcggggaacgcgatctcaagatccacgaattcgcacccagaacggaacgctagtcggtacagctccattgccgcatcatgagcatcatcggggaagcggccaccttggctcttggtgcggatggtgaagatgagcggcaaggtggtacgacggcgaaggaaagacatttgttccatgacgtagtcaaccgagggaatatcgccgtcaactgaagggtccttcaacaggtcgacccgcagttcgacagcatcagacccgacacaagcctcagtgataatatcgcccgatggttggagatcaggcagagtcaatgagacaaagaagctgtgcttcttcttcttgatgagactaaggctgtctatttggccagtgactacccgcatgaagcgggtaaagtcctccgaggcaagggctagctccgttgaggtcgagtgctgactatagtactggatgttgctgcacttttcgaaccaaggcttacgtcgtagccacacgcccatcatatcctccacgtaggcagggcgggtcttatcaacttggaggaagtccatcaccagcttgatgttgcgcatgatgaggagcacgttgcccttgctcttgtggtagtcggtaagtagttttcgtgcctccggcagttcaacaacacctccgccgcaagcgaaggcatagccagtaggatgatccttaaggacacgccgaaggacagcgagttctgcatctctgaatccctcccagccgcgtgtcttgataatatcggggatagtcgtaccctcggaagtctcaagctcagtatcaagatcgatgaaccgacgaccaagagccttagaaacccagttgccagtggtggtctttccagcgccacgcatcccaatgatgaagatagaggcgctgctccgctccacttcgctcgagacagcatgctcggattcctccaattcttttccagtcaggttcacgctgaacatttgcttcaaggtgtcccaccagccaggccaggtcttaccaacgcattctttctctagaataagggtggactggggagcgacaagagacaacacactgaaactgaacgcgacacggtggtcatcgtaacagaaaataccaccggatggctggcgaagggtggaacgatcaataccgtcgatctcaagcccgtcgtcatgctcacggcacaccacgccgaatttggccaattcatctttcatagccttgatacggttacattccttgacacgctgatttgcgataccgtagatacgagttgtgtggtttgagcccttgccccgggcaacggccgcgagaacggaggcagtaaggaaggcatctgtcatgggctccatatccacattaggcagcggctgcaaaacgccatcagtaggcccagtaacagtggtggaagtatcggtctgtaaaacggagcagcccataggccttagaacatccactgcgaaacgagcatcgccctgaagggacttggaaccaatgttagggatagtacaagtcgtgccagtgagggcagcaatggccaaaggataggtcgcagagcttgcgtcgctctccacaacatattcagcagggttcacgtagtgagcctgagggatgtggtaggtgtgctcctcggtagtagacttcttcacgtcgatgccgaaagatctcatcatcgcagtcgtcatgtcgatataaggctgtgagatgggcttaccaccgaccagcttcaacgtcaccggctccttggcgtatggagcgcacataagcagcgaggagacgtactgagaggaaactttagcggccaggttgatctttcctcctgcaaaacctccagaagcggcgatcttgagaggaagacatcccttgctttccatgtactcgacaccggcaccgttgacggtaagagcgtcgacaaggtcgccaataggcctttgcttcatgcggttgttgccggtcaagacactcgagtcgacactgctgggggtagcgagtgtagccacagtggtgaggaatcgtgaggcagttccggcgttacccaagtacagaggcgtaggacttgcgatgatctttccgcccttgccgttcacaacaagaacttcaccttcctcctcccaagagaaagttgccgcgccgagtcgctctagggcattcagcatgacctcagtgtcgtcggagtgcaagagattcttgatgcggcaggttccagaaccaagcgcagcaagaacaagggcacgatttgagatactcttcgatccggggggtgcgcaagtgacattgagcgacttgggcactccggggtgaacctcaatactgggagcaaggacgacaccaatatcctcattagagacgacactggccttcggctcgtgagtacggccgattgctgacaagagtacaaccttctttttgggaccatcattcttcttgtccaaagccatgttgaacagcaactggtctactgagcagtgcttaccagcagtcaacttacgaacccgtggatctttcatggaagtgggcaagccgtaggccgagaggcactttaccacacgagcaacggcgactcccttcaggatgcccaagtgtctcgcaagctctgcctccttcaccatgccgattgcgacacattcgccgtgaagaatctgaggcgtaaggatcgcctcaatggcatgcccaatagaatgaccccagttgagcaggttgcgaaggccgccttcacgctcatctgcggagacaacaaaggccttgtgacgtgctgatgccaagattctagccttcaggatatcccggatgtcgtcgaagcgaccttggccagcctttggctcgctgcgcacagcagccaaaattgaatctgcgttatcttccaaggcagtgaattcctcttcacttgaaatagcagcagtcttgatgacctcggccatgccattgatgaactctcggacggggagagtctcgaggaactcaagatcaatgtagattcttgatggctgccagatagaaccaataaggtttttaccaagcggagtgtcaatagctgtctttcctccgattgaggagtccaccatggcaaggagggtggtcgggacctgcacgaagcgcacacctcgcatgtaggttgctgcaacgaatccagtcaagtccccaatcacaccaccacccaatgcgatgatcactgtgtctctaccacatggtggattctggcttagcatccaatcttcgatgtcggcttttgtctgccgtgacttggagctttctccgggggccgcattgtggatgaggagccgcgggggtggggtgatggaagcagcggcagcctcaaaagtcttttggaaagtaggggtatagagagatccgaggttggtatcggtgattaggacgtaggtcgtcgaggacaagccactgatcaagtcctttgcgacaaaattgcgccaaagaccaaagtcagcgacaatgctctcccggcccaagatgctgatcttggtgggttcagacattgcggaggaggatatagataaggacttggtaatggcgaagttcaatgactgctcaattcattctgtgacttgttagtaccctgactcacggtactttatctgtttccggccacaatgaatctagggatacaaggtgcacaccgatcatttggaggagagtgaatgattagaggagtttgaccaacctggacaaagcttatccaagagccagtagtgtatcaagagaatataatctccaagtcaagaaccaactagacagaaaaggaagaagagtattgctgcccctccggtgtcgcgggcagtttcttgaccgcccggtgactcaatctatcgatctatgatagttaagcccttggacgtcatcacttacgatttatatcataaaaacatgtacctgcaactttgcttctaattttaatgagttccgattcagactacgaaacaaatgtcctataaaaatttgccaacttctacatttcgatctcaactttcaacttagccgacatcgcctgattcgatcgcgaaccctacaattagagagtacagggatataaatcagccttagaacgatatatagtagctacctacccaggccgtgatatctcgtggcatcacgccgtgaatcaccgaagttcgaattcttctttgcctggctatttacacatgaatacctgccatcactcttcctcatcctcgtcatcgtcctcagcctccgagacttcttctccgagttccttgagccgttcctaagataataattagtcagatccccagaagcttgagaaaatatctggccagtaaacataccttgtcctccattcgcttagcctcaaggtccccaaagacaatcagcaggtcttccagttcagactgggctgactggcgagcctcctccttttctttggcttcaattttagccttgtcgagctgggcctgcatgcttttgagggcttcggccgcactacgagcttgagactcggcctccctagccttttcctcggcctctttagcccgtgcttccagcgcagaggtctgagatacggtgccttcttgggctgtttcaagatcgttgctagacttctgagccttggcaaggtctgactttagaactgcgacagactgctttagggttgcaatctcagcctcatgctcttttttggctgcggcgagatttgactcgagagtcccgactgtattattgtgaccggtggattcagcctcatatttctgcttgattgtagagagattggactccaagctttcaactttgctcttgtattcaccgacttccgcttcgtgattttgcttggctgcggccaacgtagattccaggctctgcaattttttggtaagatcggtgacttctccatcgtgggttcccttgatgctttcaaagtctttgatttgcttgttgaggtctgccaccagtccatcattgcttttcttggtattttctagctcctgaatcttcttttcaagatcggcgacctgtcccccgtgggccagcttggactggctgatcgtgttctgcaactcctggatctttttgctgaggttatcaacttgaccgttgtgggatttcttggtgctttccagatcttcaatcttcttttgaagatcagtgacctgtataccgtgggcctgattggactggctgatgacagtttccaactcctggagtctcttattgagattgacaacttctcctgtatgttgttccttcatgtgagaaagctccgactctaagccacggatagtttgctgcaaaccaacaacctctcgctcatgatgctctctcacttcctttgctttgctgctcttgttttcagattccaccgaagtttgtttgagctgatggtcgatgacacggagttgatcattgtgctgcttaagtaactcattcttgtggtggttatgttctttttggagcttcgatagctgttgggatagctcctgcgcatggcgttgctgcagagataggttggtttgttgaatctttgacagctcaatcgcgttagattcctttgtctttcggtggtccaactgttcttgatcaagcctccgctgaatgctaacgagatcagactccaatgtttgaagggtctgggtgcgatcttcaatttctgcacgcaatgaatcaacaagctcacgtgaaattcccttttcgacgccattggcaacaacagaaatctcaaacccgggttcacggtcaatggcacgaagcaatcggctgaagttatctttcaggaactcgatgaatgagcggtcaaagaacacctccggcagtccaccctcgagttgactaccagcggtttgaggaagaacctcaaagtcgcgaaccaatggacattcacgaagtcttgtgatcttatcaatatattgttccctgccaagctgttcaatgagtagtttatgtaacgtgatgcgagggatcggcgaatcttttgtggagaactcatagatgacacccaacaggaccgtgcaaaggccgggcaccaatttactgggggtgcgctgatgcttgatttcctgcaacaaggtttgaatgcagctaccctccccaagaagatcattcacgacgtctgggtcttcaaaaagccatccacagagcaacatcagataaccgactgtgattctttcgtcatcgccgcgctgcagaccagtaatcaggtttccaacgacggattgaacactagtgaccacttcttcgccgctctcagcgtcaccctcggtaacagccatagctattgccttcgcctctgcatcatcgaagatcaaatggaacatcagaacacaggccatccacacctgatatggatcggcatttcctcgcgcctccggagcagtgagaagtacagatagaatattaggaatccgatcctgcccgctggtatgcccttcaatggctcgcctgagcacatgcatgcgaattccaggatgatgagcgaaaaatgctttcatacattcgcaggcagcaagccgtgcgtctaaaaggttgttgggagcaggttcgaggctgagctttaaaaatgcttcaatgacattgatgcgtaaaggttcattcgcatcaccattgacagccttgtcgccgcgggggtaggagccccagaggacttcgatatcaccgaatctttcctgcaacggtgagttgccgcgaatcagatcggcacaagttgacaaggcctggacttattagacaaaggtacagacaagggtgggcaatagcaatctcaccttcgaagtcacgctaacactgaatctttgtccaaatgcaatgctaagaacttgctctgtcacgccattctgccaaaatgcagtctggttaatgggtgtactcatgccaccgcgaatcaaaaacaactggatgatggccaataggccccagacattcttatctcggtggaccagagtccactgtggcgccggctcattgtcttttggctcctgctgacattcatgaagcaaatgtgttactcttttcacacaaccggtctcgcggaaaaacgattggttggaaacattgaatctcaacaagtgagccaacaaggagaggcaatcttccactacctcggtcccatgagtcaatgctccctctgcttcaataagcgagaaaagtatttcgaatgcattctcgaatgccacaagcttttgcagctcttccgaggcgggggtcagggcaattaacaagacgagagcctctagcagaaaacattttgtcagctccaatcttccatgtcccacaaggacgcacaaataaaaacgacataccgttccgtactggctccctcgcatcagtcagcacattgactagtttggaaataccaagtggcgctgtaaaaatgcattcttgtgttcgttctggtcgtgcgctgcaaatgtgggacatcaattgaagcgaataaaggcgggagtagaattcacgggcttctaaaaggttgagtagggtagttatattatcttgtcgctttagaaacgttagtccatcatatcagggccgaggtcacgatgcgtacctgagtgaattcatctgccagccacagagctatttcgtccgacgcttcaggctaaatatatatatatataagcaacccgaatgaaactcatcagagtacaagatacccacactagattcatcaggcgtgaacagcattagaagggtctcgaggaccactttgatggtgtccacatcctcactgtcattgcgtagactgctgatcaatgaccgcaggccaccagaagcgactgatgcagggtagagttttgcaaagcttcttaatccctgaattgctgcccggcgatcttccaacaatgtagcactctgcagtctactgcttaatacgtcgattgtgtccgtagccgtttgtttggccggagcttgcgactcgaggattcggaacatggtagttgattcgcaatatcatgatcactgccggccgagggcgtaggaattggtaatcatctatgagagatctatgagagagcaaagtgagaaagtgaggaggttggttagttcgctagtcagtagaaagctgtcctattgtagtgcctaagcgccgcttttggctcaaacccgcagaattgccgaccgcccggaatttatcttttcgtcgaacggcaagctcaagaccacaagttcactgctctcaacctgcaccgcgatcatatctgcggttgcatctcttcttatctttgttacatgattcagaggagtctgtgtcttatctgaactggctcatattgtatctcattcactaacagagagatcgcgcctgcgcctgcacgaacgccgccaactaattgcgacacaacagtaccggaactctcctagtgtcgcattacaatcatgggtgtccccgcgttgttccgatggctgtccaacaaatatccgaagattgtctctccggttattgaggagcaggcccaagtggtcgatggagaagaaatcccgatcgacatcactcgtccgaaccccaatggcgaggagcaggataacctttatctggacatgaatggtattgttcatccatgtacccatcctgaggggaagcctcctccagcggacgagcaggagatgatgatggaaatctacaagtacaccgatcgggtagtcaacatggtgcgccccagaaagcttctcatgatcgctattggtatgtatatattctaatggagctttcaataccctccaaatcggagatgtccactaacctctatcctacgtacagacggtgtcgccccaagagcgaagatgaaccagcagcgtgcgcgtcgattccgctcggcgcaagaggctaaggagaatgaccagaagaaagaggaactccagaagatgctcgcccagcaacatgctacaaagaccggcgagcagttgatgcgggaggaggttgttcagaagacgtgggacagcaacgtgattacaccaggaacgccttttatggatatccttgctgcctcgttacggtattggattgcctacaagcttaacactgatccgggttgggaaaatgtatgtcttgatttattatcttggtaccaatgaacatactgacgttgacagctgaaaatcatcatttcagatgccacggtcccaggtgaaggagaacacaagatcatgaattttgtgcggtcgcagcgagcctcgcctaatcatgatcccaatactcgtcatgtcatctacggtctagtaagtttgtgatgatcttctaaatcaatcttctcagatcactaacttcaaacaggatgctgatctgattatgctcggtcttggtactcatgagccctacttccgagtactgcgtgaagatgtgtttgcccaagactcaaggcctcggggatgcaggctttgtggacagaacggccataaggctgaggagtgtctaggccgcccaaaggagaagagtggagaattcgacgagaagcagaacgctgcccctctgaagccattcatttggcttcatgtcgccgtgctaagagaatatcttgccgtggagcttcgtgttcctcagcaaccgttcccatttgacctggaacgtgcactggatgactgggtcttcatgtgtttcttcgttggaaatgattttcttcctcatctgccttctttggatattcgtgaaaacggaattgatacattgattgcgatctggcgtgacaatatccccgccatgggaagctaccttaccaaagatggaactgttgagttgaaaaacgctcaaattatcttgcaaggactagcaaaacaagaagatgccatcttcgcccgtcgtaggcaagcggatgaaagaaaacaggcgaacgagaagagacgcaaggagcaagacgcggctcgaaatgaagagcgtgctcaaaagcgaaggcggagttccccccagcatgacttgacagctggggatcgctctcacggtggtggcgagcccgcccctcccatggaacttatcacacccggccgaggccacttgaacaaggagactagagagctgacacacagcatggtcatcaaccgcggagctgtgtaccgtgctaacatggagaataagagcgccgctgccgtgttaaagagcaaactcatgaagggtaaccaggatgtagctggagacagcgaaactccagctacaaatggcgaagatgtaccaggtgaaaccccagggcagacttctcccggggttctcgggaaacgaaaggtggatgcaactgaacaggagcttaccgaggcaggaacacccggcagagactctcctctgcccgttcctgttgctcccgagaagcctaaacaagatgagccccaagaagacactgtcaagctgtgggagccaggatacgccgatcgatactatgagcaaaagttcggcgtggacccgaaagatttagaattccgccaccaggtcgctcgtgaatatgcgattggcctttgttgggttttgcaatactatttccaggggtgcccctcttgggtatgttgtcaacccccacttaattatacgattgagcttcgctaacttgattgcagacctggtattatccaaggcactatgcgccatttggtgggttttttctttggtggcttccctcagatttcccagaaatcagctaacacatattttacagctgctgatttcgttgatattggcgatatggacgtcaagtttgagaagggcacgatattcaaaccttttgaacaactcatgggtgttttgcctgcctcatctaaccacgcgctgccgaaagttttccatcctctcatggaaaatcctgatagcgagatcatcgatttctacccggaggacttcccattggacttgaacggcaagaaatttgcctggcagggcgtgattcttctccctttcattgacgaaactcgccttctaaatgccatggcgaaggtatatccgctcctcactgaggatgaaaagagccgcaactctcatggtcaggatgttcttctgctatccgaccgaaaccctttgtaccaagaccttgtcgcgaacttctactctaagaagcctggcccggcacaatactccattaaagaggatgtgagtggcggcctggccggtattgtcgagcgcagcgacacctacatcccccacagctcgttagtttcgccattggaggcacatggaatgccaggagtcgatgatgatcgttctctcacgtgagtttaaccctcccatctctgcagtttgcttctttgactaactgatcaaagggttctgtatacgatcccggagtcttctcatgtccacaagtccatgcttctccgcggggtaaagctaccgacgccaatgctggattcaaatgatatcagagccacccaaacacgatcccaaaactcgggccgatcattcggtggcgcacctttccagggcagaggacgcggcggccggatgaactactcaactgaccgcccgaacccattcgctgcacatcttgacccgaagttcaactctgggccttcccaaggtggtcccggtggtgctcccatggtacctcctggatgggttccccctggccaagggtacggaggctacgccagaggaccgcctccccctccacgcggtggaatgccacaccagtaccctcctcagcaccctcctcaacacggttatcaacagcctggggactattatgcccagcaaaacaaccagtacaaccagggcggtcagtacaataacagtcatcaatcaggctatggccagcaggattatcgtggaggcagaggcggtaaccgtggagggcgcggccgtggtgggcagaaccgagatcactactccaacaaccaaggcggaggagggtataatcggtactaaaagtaaatgagggtccggctttctgactgtttcttgcttcttccgatactcctagttattgatcttttgatacgtttgggaattgggcatgtctagggaaccattggagttagagaaatgtaaaatgaattcaattgatgttccaacagacccttcttttgtccttctgcatgcaagagtcgcgccctgatgccccaagagtatatacaaaggctgctcgaatccccatgctacactatacctagacagtaaaaaaaagccattttctcaccacatggtccaaagtctactacttgttctatgttcatctaattggctgttttgtaattattctcactctttatttgggagtcctcctatcttctgcccgcaaccctaatacgatgcttgtctagttgtagaaggcggtgtaaatggaggggccaaggcacactggcagaaaaactaggcggggtgactcacccgtagacttgcaagcccttagagatccttagtcgcagtcaatcttctcttttaaaccactggattcaccacatcatggattttcctgcggaagaagaaatcgtgctcgctcgttggagggagatcgatgccttcaaacgccaagttgagctttcggctggaaagccacgctatggattcctagacggccctccgttcgctacgggaacccctcattatgggcatttgcttgcttcggtaagacgacagcgaacaatttgcgaatgatttgtgttttaatactttccactagacaatcaaggatgtgatcccccgttattggtctatgaagggatatcacgtggagcgtcgttttggctgggatacgcatggtgttcccattgagtaagttcaattcaattctagacaagacttgctcaagactgtgtagcccaggctggctgacacaaaacctagatatgagatcgacaaaaagttgggcatgtctggtctgcaagcggtccaagaaatcggaatcgagaaatataacgaggagtgtcgatcgattgttatgagatacgcgacagaatggcgccagaccatcgagcgattgggtcgctggattgacttcgataatgactacaaggtacgctcgagtacgtctgacattccctgcccttatgttaacactttttttcttgtcatttagaccatgaacccgtcattcatggaatccgtctggtgggttttcaaggagctcttcgacaagggcctcgtctaccgtggataccgtgttatgccttactccaccgccctcaacacgccgctcagcaacttcgaagcgcagcagaattataaggatgtgcaggatcctgccgttgttgtgacattccctctgctggatgacccagagacatgcctacttgcatggaccactaccccatggacgcttccatcgcataccggtctgtgtgccaacgccaatttcgagtatgtaaagatctacgatgaggctacgaagaagaactacatccttctggagactcttcttgggactatctacaaggacccgaagaaggccaagttcaagatcatcgaccgcatcaagggttcagacatgctcggatggaagtatcaacccctctttgattacttctatgaagaattcaaggaccatggcttccgagtgctgaatgacgactatgtcactgctgaggatggtgtgggtattgttcaccaggcccctgcctttggtgaggaggattaccaagttgccatgaaccacggcgtaatttccgagtctcgtcatcctcccaaccccgttgatccgcagggctgtttcacagctgaagtccgggactttgtgggccagcacgtcaaggctgctgacaagggcatcatcaagttactcaaggccaatggtcgtattcttgttgacagccagattactcacagttatcctttctgctggcggtccgatacccctctaatctaccgcgctgtgccatcctggtttgtgaaggttaagcctatcattcccgacatccttgatggcattgaaaaatcccactgggtcccctccaatgtcaaggagaagagatttgccagctggattcggaacgctcatgattggaacatttctcggaaccgtttctggggaacgccgttgccattgtgggttagtgaagatttctcagaagttgttgctattggtagtatcgagcaacttaaggaattgagtggctataagggcgagctcaccgatattcatcgagataaggtcgatcacatcacgattccttcatcgaaaggaaatggcgttttgagacgtgttccagaggtctttgattgctggtttgaatcaggaagtatgcccttcgcaagtgtccactacccctttgagggtgcagatgagttcgaggaccgtttcccagcagacttcattgccgaaggcctcgagtaagttgcccatgttttcccttctctgtccgttttcacgtgctaatattatatttttagtcaaacacgagggtggttctatgtactcagcgtgatcggagttcacttgcgtcaaagactaccatacaagaatgtagtggtgaatggcattgtactcgcagagaacggtctcaaaatgtccaaaaggtgcgtaaacacaatcttgacatgaccacgacccgaactctatctaatatgccgatctcacaggttgaaaaattaccccgacccgtcgctgatcatgaatttatacgggtgagttccgcagttcttcagtcccgagttgttcagcttttcatgttcttcgggattgtcctcataagaagtttcattaacattttttaaacagatcggacgctcttcgattgtacatgatcaacagccctgtcgttcgtgctgagcctcttagattcaaagaatctggcgtcaaggaaatcgtcagcaaagtgcttcttccattgtggaacagctacaagttcttcgagggtcaggtgaccctcctgaagaagacttcggacattgactttgtctttgatcctgcagcagagagcactaacacaaacgtcatggaccgttgggtccttgcaagctgtcaatcactacttctgttcattaatcaggagatggccgcttaccgtctgtataccgttgtaccacgactcctagagttgattgataacacgactaactggtacattcgcttcaaccgcaagagacttaagggtgaaaatggcgttgatgacacattgcacgccctgaacactctctttgaggttctttacactcttgtcaggggcctcgctcccttcactcccttcatcaccgacaacatctaccagcgccttcttccccacatccctgagtcgctccgtgccgaagacagccgctgtgtacacttccttcctttccccgaagtgcgtcaagagctctttgatgaggttgttgaacgcagagtttctcggatgcagactattattgaacttggtcgtgtctcgcgtgagcgtcgggctatcggtctcaagacccctttgaagtcacttgtcgtgattcataatgacccgcaatatctcgaagatgtcaagtccctcgagccttacattctcgaagagctcaacgttttggagcttgttctctcctctgacgaagccaaatacggtgtcgaatattcggtgtccgctgactggcctgtgcttgggaagaagctgaagaaggccgttcaaacagtcaagaaagctttaccttctcttactagtgatgacgtgaagggatacctcgagaataagaagatcttggttgatggcattgaactcgttgagggtgacctcgttgtgaagcgaggaatcaaggagactgacaattccaagggtatggaaaccaatacggatgctaacgtgttgaccattctcgatgtgaacttgtacccagagctggctcatcagggtctgggtcgtgagatcatcaaccgggttcaacgccttcgcaagaaggctggtcttgttcccaccgacgatgtgaaaatggaatacaccataatctcagacccggacaatatcggccttgatgaggctttcgaatctcaggctcacgtgttcgagaaggtcctgcgccgtcccgttgaccgcagtacatttggtggcgacgagcttcctactggagaggaagagggcactatctcacaggaagaacaagaggtgcagaatgctactttcttgttgcgccttcttaagctttagcatgccaaccaaaagaaaatgtgtagagataatatctactttttaactattttttgttgctttgaatgaaatcatatgcaccttcaataccaatcaatacctggcgaaatccaacctataataatttacaaatgcttttgcttgcgccgccgtaccaaaacagcctcaaatatttgagtgattccgatgcttccaacatataatccaagggaacctttctttagccctttttagatgccgcctgttgaatggttagcttgtcgaacagcgaagcactcgctcgtcacctaccaggtagcaatccttcagtcgcagaaactccttggcgcacatatctttatgtaccgagttgtaatcagtaacaacacacttgccgtacgccgcaatctatcaagctagttagatcggcaatgagatgaggtgagacagaaactacacacctctacagagcattgggctgaagccttggcaatcttctcgactgggcgagttcttcccggcatcttgcaatacgaggtgatgatgcagcaaatgcaaagtagcttaacattccaatgtgaaagcagtaagtaggacctccagagcttgggaatccaagattgttacataagaccacgtgaccgtcctgcatgtttctgtcgcgacaaccaaaacaacccgctcaaccgaccgttatctcgattgatggcgcatgggttgagtctattgttcccattcttttggaattgctgattgcagagtgtctctgttcgcgcatgtctttgattctccgcgctccccgctttcgcgatgatttatttggtcctgcagctctatgacccaaatgcgacaaccgcgccttaagatcgcgatttttcgatgcctccgatatcctctcagcgtcaagccgtgacagaagagatctcatctctttccgacgacggtagggcgcaatcaatcactcgttaatttaaacggagcctgacctctatagatgtcggctttctctaccaggttatcgctgctgccgagacaaaacccgaagcggatcgactcccattccgggcgcttttcgaagcatatgacgaagtcgttggcgaacatggcgtcaacgcagatccaggccatgcatgcctgcgcttcctgttcaagatgggaagcaaagatgtacgcggcgagactctcttcgacaaattcgagaatgcgctccaacagatgggaatcgtgattgaaatcggcgaggacggctctaccaacctgaatgagacacatgactacgatcaatatacagtggatgttacccacagccagaccgttgaccgtgaccattctccaattaccaatggagtgccaccgacacccaaacggcgcgcatcgttcaacaccacctacgacattggcgaggatcccacacagagaagtttcatcaatcgccctagctctcgatcgtcaatgtcgcggcttgaaattggcaagccccagttttctaaaccaaaactgtcacctacctccaggcataattctgaacctagcaagtcgccagatcggacacaattaatcagccagtttttggatgttggtcggcggttgcttagcagatttgacggaacagaaaacaagcacggagtcacggaagaaaccttcttgactaatggagtgattgcgaggtcggccgttgctcgtgatcgttcaaagagaatgaccgaggccccacgtccccgtcgttcaccctcgtacgattcttcgggcagttccgaatccaaagaggtgcaatcgatcatgtcgcagagcccagaacacgattcttttgacaaagaagaggtgccaccggagttcatttaccgcccgcaactttccgatctacttcgagatgcatcgaccttcaacatgtaccgacagcgatcgatatgccgtcgaattttgacacaatggctgaaaaaagcttttcaagctcgacagactcgccaaaccagggaaacactcgctgtcaattacgatcgaggccttcttctccgacaagcctttgatccatggcgagcagtaatccaagacaaacgccactcggctcggacagatcggttcttcaagcaccttgaagcgcgtgccagtcgcgcacgggacttatatctaatgaccaaggcgttcagccactgggctcaacttacgtcagaagaagtagctcggacttctgctgcccggagacatgtacttggcgtcaaatatttcaatgcctggcgcgaaatcactgccgtcaacgagttgaaggctcagcgttttgcgctacggaggccttttaatgcgtggcggaaaaagatccaagatttgaaagcagcaaaaactcaagctatcattgtacgcaacacaaagattcaaaaagcatcgttctgggactggtggtggtgcttctgcgaccggcgtgttcttgaggtttctgattatcgacttaagagacgatcacttctttcctggcttcggaatttgcgaactaatcgagagctcgatcatgaaatagatctacataacagacagtcatctttgaagtcgatattccagatttggtctcatcgctcgaaaagcattgcacttgcagatcaggaagtccaagcttctcggcgccaacatgacctcagagaaacctttgatgaatggaggattcagtctcggctggccccggctgcttctcgggtctctgggatggtgaacactcggattctacgaaatgccctttcacaatggattggcaaagccgaaatgttcagacaggcagaggaggtagatcgccgccgaatacaacacaactcgtgggtttcctggaatgacacgcttcgctgcttggcgcttcgtgctcgaattgacgagcgcgtcaaaagtgaggcgatgtacaaatgggtcttgatggaaagattcgagctgatgcgaaggatacgcgaacaacgcatcaagcgggaagtattctcccgatttgtgacaaacactcgggatacttacactcgtttactgtctcatgctgaagcttatgagactcatcagaccgaaaatttggttcgatctaaatttgccatttggcgtgatcaaatgcaacttcagcgtgagcgggagtatgtagcatctgagttttatgctccacggcttgcagctgagtctcttgcaatctggcgatccaaacataatcaagtggtgaagatggaaggttgggctcaagatgctcgattctatttcttgatgaagaagtccatgaagcaatggcatcaggctaaagtggactccggcaaaaaacggcggcaagaatcctatgctaaagtccggcggcgtattaaggtcaacctcgcgtctagagcgttggctgtctggtcatcaaaaactcgagtcatcatggagatggagcaaaaagctggtgatattgatcgcgaaaaattgcttgctgatgcgtccgcgatattcgtccaatggcacgacaaaacaaccatgaggcttcaggattgccagaatgccgaccgttcctatttccaccaactcgcgtttgagcagatgatgcgaatgtccgaagcattcatcattcggcgtgagatggaagaccaagcagagaatgtacaccgattgcatgtcctacgactggcagcagcttctcttcgcaagctcagccttcgtatcttccagattggcagttcggccgagacagccgaagccatgcgcgaaagaaatctgaggaagcactcgagaaacatgttccgcgattggctagacaaggctcaaatgaagctggaagctcgagattctgcaggtccatccttcacgcccgcacgaatgtcaacctttggaaatggcgatggcgccggatcagcaattttcgacccctggtatcaagaccaagcagaaacacctttcaaaataagtgacttcacggcaacatctcagacaaccttccatgacccgatctctgcaagccccttggcaaccccaaattacacctctccctctaaacgagccgcccgggcgctagccctcgcccaaatgtccactacccccgccacacccttacgcacacctttcgcaagtcgactacttcgagctgggactacgactgcactatccacttcttccaaacggccgcggactggtcggcaaagctcggtgggaaatagcgtccggtttgtggatgaagaacctcccgagtctccaacagatggtcgcagatcagcgactcgacgatcttaacgatcttgttcggtatatgacctttctgcggtcacttcagcctcatgtacatcagcgattgttataattttttttttctctcataccctgtcgatacgtgcgatcatgtttcattcaatgcatcatccggcgcagcatatagcgggttcaagggtttctgggtctttggtatacagttttgcacttttgccatgattgaatgtgatactcaatttatgaaatgggttttccaaagaactttcgttcaatgagatataaagtatagcatctagtcggtcccgaggtcagataatagtaaatgcttatcggagagctctgtatgatgtgctcaaagctcttgaatacaatttctcgccgtaacaaatagcaattgctgaatccataatatcagtgatatttatagccatacatagctgtgttgttccagtcgacggtcatcggtcacaccgagtggagcgggagcgtaatcgactcaggtggtatgtctcttcgcctcgtcttgccccctgcgtgtatccagacaactccgccaaacacccataatctaccctccatttcacttgcgactctactcccaggcataataatctttgacctggcaatgttgtaacgtgttttcgagcgcaacgagcgtcaagtcccgaaccaaccatctctatgcgagcggtacttccggggagacccccagcgaagctgcaggcgttcagcacggcgctgtgggatggtcttcgtgttgttgtaagtactctcagatattgccagattcccgctccagctctgcggttcgtttaaagctccctgttgctgactcttacccccgcgcgttccccaataggcatacatctccggccacgcgctggttatcctcggcggtccgcaaacgctcctccaaacgatttacgtcgacgatacagaaatcctcgaggccgtagcttttgacgaaacatctggcaagattgctgtttgtggcggccctgatgtgttcgtgtaccagccatacggcatccagggcgaaacgctcaaggtgcgcccactactcggagcttggtcgaccagcaacacagctttataatgacaatcacaactgattttaacatatgcctttatttagtggtcgctcctttatacattccgcgcccccgatgacgacgaaccgatctatacactatcgtggggttcctcgaacgagctcctagtgggcaactcccgcctcgccctttggtttatgaatgacgaaccgcgccttgtatggaaaagggagcttgcaacacccgtgaaattcgcgcaattttctccggattcgtccttgattgttacagtagggcattatgaccgtttggtcaaggtatggagacgactcgccttcggcgcagacgaggttcggttcgaaaactcatacctgccccatccgaatgtcgtcaccgggatacactggcgattacctcggtaccctgagcaatctatggataatgttctgtatacattatgcgccgataacaagattcgggtatgggcagtgacggacgttcatgcgctttctgccctacagttctgggcagagattgacatggatgattcggtccaaccgaggcatgcgtcggatgaggatcaaggaccacaacggcggtatgggtttattttagatggccgcgacttctgcgctgcgacggagcgtgctgttcagaggaccacaggaaacaaggaaaatcatgcgctagaacatatcatcgaggttgcgagcaaggccccggagatctgtattgtcactgatggccggggccatatgtctgcttgggcttttgaagatatcggttctaaagcaaagaccaagttgagcgtcttcaatattctccatgtcgaaggcttggacttgggatttgtattcgatcaatcgccgcaagacgactacgctcagatttgtgcattccagagtacgccatcggacgacaagctcagtgttctggtccatcacttcgacggtcggatcgagtggtatgattctcgtgtggatgttctgtttgatcctgcaccccgcacgaaaagaatcacccagatggcctcttggtctggccatactgcccctgtgaaaaagattgttcggaatgcgattggagatacgctagtgtcacgtaccaatgaaaacaaagccactgtatggacacagcggcgtcgggaaggaagatcgatcttagcgtacaagagtgtcctcctctcggatgagcatattcatcggacatgtgtgctagagaacatgaatcttctcgtcaatctccaccacaatggggtctccctgtgggatttcagctcaaatcatgccaagaaattgacttctttgccattctcactgcccggcaagccactatgtgtgctgcaaatccccagcatccaagcgactccagatgtttcctatgtagcaacaatatgggcagacatgcacggaattgcgtgggaaatacgaggcccgagtcagggatcccacaaggggagctttataaatgagcttggctatcaagtgcgagaattctgcacctttgacatggggctggaggaggatgttgcatatatccttcccgtcgacccagcaggccccaaaacaaaaatatcgggcttcttcgattctttttctaccgacatcgctctctcctacacctacagtggagttgtgcgcacatggacagccacgatcgatccagtgaatgtgaaggtcgattggctacttcaatcaaccgttgatacaggcatcaccaacccatctatggctagtgggagctctattcgcaaggcagctctggttgacgaggaccggactcacctcacaatctgggacaccaacaatgctcagctggaatttgagcaacattttgctcctcatgacattatccaggatttggactggacgtcaacaccagacaaacagtccatcttagccgtgggattcccacataaagttgttctcttatctcagctacgctatgattatctagattcccgaccctcgtggacacaagttcgggagatctggatccgagatctcacacctcaccctataggagactcttgctggctgaataacggccatttagtcattggggctggcaatcaactgttcgtttatgacaaggatattgacgttggagaccgcctagtgtctgagcttcggatgccatctcgcggactatcatctgtcgatctcttcgacgttgtcagccggctgaatggcccgttgcctgtgtttcatccacagtacttggcacagtgcattttggctggaaagactagcttggtacattcgattctcttaaacctacatcgcaagctgaagttctatacggagggcgatgagctagatggtttcctagatatgccggtagaatgtttctacgagcaagatgtaagtgcgcgctttctcatatctctccctaatactaaggaaaatcagggttcccaacaaggggtctccaaggaaatgcgctcttcctacgtcgattccactgatgaggaattgccgtctgtcttagatgaaaacgctgcggccgcgctcaatgagagcttagcacgaatcgccttgccgcaactgtctagccacgaacagttccgcttggcagataccattgaatgcgttgccatggttgagaagcaccggcgctcaatggacgataatgcagctcggtatctcttatttttccgacaacatatgctgcggcggacccaaggagttgccaataaagacgctgtctcatggcgagagattgtctgggcttaccatagcagcagccaagatattctcacagatcttgtctcccggcaattcaatggaaaattgacttggaaggctgcccgtgaaagcggtctcttcatgtggttatcggattccatagctgtggtgcgtgtctgtcacgtcatttcattggtcacgaactaaccaattggttagaaagcgcaactcgaaatcctcgcccgatgtgaatacaccaagacggaagagaaaaaccccatcgattgtactttatattacctagccctcggaaagaagaacgtccttcagggtctctggcgtattgcacattggaaccgcgaacaagcagcaactcaacgtttgttggcaaatgactttagggaaccgcgatggaggacatctgcgcttaagaatgcttatgcattgcttggaaagcgacgatttggtaagtcgagcatcatactctacaactgatcacttccggctaacacccaacagaatatgcagcatcgttcttccttctcgccgatcatctgcgtgacgctgcaaacgttatcataaaccagatgggtgatctccagcttgcgatcgcaatcactcgagcctccgaaggagacaatggaccggttcttcgggagatattagaagaaaaggtattgcctcaggccgcttccgagggcaaccgctggcaggcctcctgggctttctggatgcttggacgacgggatatggcagtgcgagcactgattgtgagtacttttcttctctagtcgccaaaccccaattaatcaaatctagtcgccggtcgagaccctcctattatcgacgaccccagccaccccgggaagcccggggcgagtaacccttcagtccaagtcatatctgtccaacgatcctgccttggtagtcttatatcaacaactccgcgaaaagacactccaaaccctcaaaggcgcctccaaagtgcgacccagggaagaatgggaattcgttattcgcaatgcccgactctacgaccgtatgggctgtgacttcctcgctctcgatctggtacgccactgggagttcctaggcggactgcctagtcaggatgtactgaagcctaatacctccttggaaatgaacgagaacggagtcgattaccggaaaatgcttcatcggcggagcagcctcgtagttgctgatatgccggtgcgccgagcagatgtctcacaggaacccacacccggcgagaaaccgaagaaagaagaacagaaagcgaagccgaagccacctcctacgatgtttcatgagccggatgccaattcgttgctagacagctttgggttctaggttagggacttaattatgttgacactgtaatattttctggatatacgtacgtccagttgctatcgagtgagaaactggggcttgagcacatatataccggataatgtctggcaatttttgatttccctttccgttttagtgctcaccccttgccgctttttgctcactgagtaaaactactccggcccgctcactgagcatcacctgagcagacccatcccttcactgagcactcacgagtcaccgggcactcaatgagcagcctgatccgctcccatatagcttagtccacgctcgtctcacgggtaacaagatatctgtggcggacgatggtactccgtgtcccattcaccacgcaagtaactataagtctaaaccatcacactcacaaacggaacgtttatccaccctacatcattcagagtacacccttcaatgggttttccttcatcgtcaattctgaacccgtcttcatacggactgtactcctcccaatccagccgaataatgtgcacaacagccatactctcccttctatcggctaggaattactctagcatctcttgggttatctgaatgcagtacctacatcgttgcgactcttggattctgattcggtttggatcaagctcagacccttgttcctcctgttcggcagttgacgcccaccgcttaaagtgatcccgaatcaccgctgtgcttgcgctatcaaatttctatgggtcgtcaaacacggtcaaggccagattatcaagtaaatcagggcccgccatatcttccagtgactccgtagtatcggcgagcagacggcgcataaattctttccagtctgcgtcgctctggtatgtagagcggtagatagcaaaaccccatgcgcgatgaccatctttacgaagccaacgctctattttgtcagcaatgttgctatgtgagctgatgtatgggtggcgtggagattgttcctgcacttgggggaattgagcttctgggcgcgtgtgtttttgcataggattcgccggtgaaattgacatcgatgagcagtatctttgtagggggaggttcagatgccaacttctttgcccaggatagagcgtgcgcgatgtaactggtgagataaaagcaatactcgtttttttcgatatatgaaggctgaaggtgtccaagcagttaaacaatagcatagtcacaatggttcacgtgattcgcgcccatgtaggcaatacaacttacttcacttccttcattctaacaattgttgaccaaggatcaaacctagcgagagagtcaccgtgctttcatctcaaattaactgtcttgggttattcttaatactacgtcttatcacagaagagtaccaatcggcctgacacgtcatgtttacatattgagattcgacctctccaagaccccggacatccgtacgtatattgtactgagtacaacatctgtgtgatgatctaccctcacacaatggtcaatacctagtcattgcaaggagactgctacacagtagcggtcaagatggagaatccagtttgaagatgcagagtggaaaatttcgcagatcccagctgacaattgtgttgatccccattgctctcactggctgcactacagcccgtagcgcgcttcacctactccagcagccccagatggctgcagatgggttccagttatcctgatggatttgcctatcccagtgcgatcggcggcgccaatctgcgctattacatcgccaatcgcgccgatccttcagctcccacaccttttgcgaacgatggagacttaggccgagcgtgagaaccctcttgcgccaatggcctagctgccgatcgggagacaatgcatacgttcatgcagactaaaatcgagagatgatgctcttaagacttcccccggcccgctggggtttgaagcttttcagctctctctgacttcagaccctttttttgtattctagcgatatatccctggtcgatttttgttctttttttcagcgacaatgcctaccaatatcccaggaccgcccggagttcccctcttgggtaatgttttcgacgtcaaccccaacgagacgtggaactcgctcaacaagttggctaagcaattcggtatgccagcaacccagccctaacgagtgatcactaattttttaggctccatttttaaaatcaatgccctcggacatgagatcgttttcatcggcagtgtcgctctgttggaagagatttgcgaccagacccgattccgcaagtgtgttacaggaccagtggtcgaaatccgatatgccgtgcacgacagtctgttcacagcatacgactacgagaagagctggggtatcgcccaccggattatgatgcctcatcttacgcaatctgcgaccgacaacctcttcggtgacatggcggaggtcatcccggacctgaccaagaagtggagtgcaggaaccaagacacgcactctgctcaccaaagacttggaccgcctccttcttgcatcctgcatgcaatgtttcttcaaccagcgggtacacgtgctcgaaggcgccgagccacccatgctcagcgcgatggacggcgccacactggaggcaatgaagcgacccacccgccccaagttactgaattggcttgtataccagcgccgattcgagaaagacacgaggaccatgcgcgatttcgctgcgcaggtgatcaaaacccggaaagagcagccagagactgcccgcaaggacatcctggatgcgatgatgaacggcgccgacccggagagcggcgagaagctctccgagtcgcaaattatcgatgagattatctcgatctttatcggtgccgctacagcacccaacctcgtatcctacgccctgtactacctgatggagaacccgagcgagatcaccaaagcgcaggaggagatcgaccgcgtggtcggcgacggcaatatcgacctagagcatctgcagagccttaattacgttgaagccatcctacgcgagtcgatccgtctttctgccaccgcgccgggcttcaacatcgagcccattccttctgacgataagagccctgtccttcttgccggtggcgagtaccaaattgcccacaaccagcccatgatcgcggtcttgagtcaggtcaaccgcgacccggctgtcttcgaggaccccgaggccttcaagcctgagcgtgttctcggcgagaagtgggatcagctccctgctgccgcgaagaagggcttcggtaacggcaagcgtgagtgcattggcaagctctgggcttggcggtggtcgttctttactctcgccagcattcttaaggagaatacgtttgagctggcgaatcccaagtataagcttgagtcgaacggtgcattcagtatcaagccgcttgagttatatggtcttgttagcccacggaagtaatcttgaaattgtttttttgttgggattgggtaatgaatttgtcgatatagttacatcaacgttatgatgaatagatcttagaatggaacaagcttaactctatttttattcttatttctatctttatttgtgaaacatgggtagttcctggagatgggctcattacgtggcgactacgtagtaggcgattgcgtatatacgccacgcggacaccccaaagtaagacaagtaaagagaggaagttctacaatagaaagaagcattgaaagaatgttttgtatttttataaccaaaaaaaggaccagcctaaaagtctctatattgacatagaagcagaaaccattccagctgggtgtagaccatcctccgagatagaatgatcaagagtctatcttcaaaatcatatcaaatcaaatctcaaagaaaacaaaatttatccgctgtaatcaatggtaacagccagacgaacaggaccagaggccaagttggcaccaataccaccgacatcggtctcagcagaggtgtaagcgttattgacagtagcagcgtcctgggtaaccgaagagcaaaccgagccaagggcatcacagatctgcataccagagatagacagaccagcattctgggcagcgataacggagacatcgaagccagaccagccactgttggtagtggaaccgaagtcgaactcgccccaggtagaagcgtagccaccggaggcatcagtagggatagtggatccggaggcggcgacccagccaccattcgagtcctcgtcgaaggcaatgtagacggtctcgccggcggcaagagtaaaggtgttacaggcgttgccgtaccagcctgtcatctggccatccgggccgtacttgttgaagatggcgacggtccagtcgtcggtgttggagcccgtgaactgcgccacgtacttgtagttgctggcggacgcggcgtcaacggtgatgatgttgctgccgtaggggttgcccacgttgccttcgtaggttgcgcctgagccggaggagctggtggagctgccgaagccggcggtggagtacgagccgctggagggcgtggaggtccagctgctgccgctggcggctgaggaggatgtggcctggcggcgctcaagggtggtgggtagggccagggtgctggtggtgagggctgcgagcagcaggagagacttggcgaattgcatcttggtgggtttgtgtgttgggagtgtgttgagtcacaaatgaaggtagataacccagtgaagatatgaaagagtgttgtgtgtagtggttggattcgaaagaccgtgttgtaaaggaatgaacggtagtaccaaaaggagtgtggttgcttgaaggaaagagaacagacacgagggtcaacggcaagggcaagtatatataccctcgaaatcgacagagtcttctccccacccgccacgctcgcctcgtaggtcgtaagtaaaagatgaaccgaaagttccgggtacctggctccatcgcagcgaaccactcgcggtgcgcacttgggcatacgtcaaaccgttgaaaggactcgtatacagagggttccacaaaggtcgaggccgtggatttgatatgcagttaccattggaggtgatctggggttggagtagatacataggtataatctgattgggcctatctgtgtacattctaagccaccaatgaatctagaattcgagatactccagggcattcttcattggctacccagtaaagagtgggcttggtcattgattatatccatgggcatctgatgtctagagccatgggtggacccggagcaagctctgaattaaaccagggaggggagacactttccagggtttcctaactaggtattctccgcatctcaattggtatacatccaggatgagggactacatgacaatattagtattgcagatacgagaagcgaatatgactgcagaatggagacaaggatgactcggcctagaaattcaaagtttgcaaatcgcattgtctgggtccaactccaaaagatgccctaatgtgggcccaacggggatcagatcgttttggtccggggctaaaggcaacggaactaccaggaactcagatccgggatgattagaactatggctgcgttatcaaggtgagctattgagacgcgtaataataatatggcattggcattggcatttaacattttgctggttcatgggagtatgtcggcctttgaagtcgattgatgggattttgtagaatttggctgatccgtggaaatgacgttgtggtccaggagacaaagtagcatgattggctgaatatatggacctccgaccaatcatagttgattgtattgtcttggcagggcatggcttgtatcgtggccaatcagaaccaacccctgttacaatccatggtttcccattctgttccttgaattctcttcatttgactttcttctggaaaagtcgcttggcccttctttatatgcaagccaccatcttccttctaccggctaagatttccctaggtggatcgtgtgattctttctgtgttccacttgctccacggccaagtcctaacccatgcgaattcggagtaataaagaactcggtgtttgaagagcaaaccttggaacagaccgcggggttcacgttgcaatctctcaaatgtggaaacaagccatggcatgttgggtccggcaatcgtttcggatatttgaacgaagattggtcttttttcggcttgaaacggtggaaaatgaaagtagacgatacacaccaccaagccctaatgcgatgatctctatgagacttggccaaaattgtgggtttctgtgacaaacgaaaagtctacacatgtaaatctggaagagtctagaaagaagttcagggtctttcatcttcaatgaaaactttgatttctgaggccacttttttttactttcaaaagggcagtatctattgcaattcgctggtgagatttgtgcctcaataacccacaagctaggaggcgttctatccactagaaccgatgacagaataatagtcgcaccgagtcagtaacagtcaatttcggcgctattatgtctgtttcatcaggccattattatacgacaatatcacgtgtagacactgcccttctcgactcgtggccaagggattacttccagggatttcctaatggcaaagaccaatcaaccagtatcagggctccaggccgtcccactataatacaggacctggccaattaaagtggcggatgaaactgcagctatgttgtagagatgtgtgatttgtataaatcttgaaacacaaagtacaagtcacacaagagatgcgatgctgtcgatttgattagctataaatccaaatccaagtacaatttctcaagtcaaagttcgggacttcagaactggaaggttgcaaggtattggtaaaccacagagagatagatgagcaaggaagacaagatcattactctttggttatcacatagaaaattcgtctgtacgttgtacgcctttccccgccttcgttactagtatatatcgtagtgctaaatcccgcatgtttactccgtactactattcccgttgctgtacttctatagctaaatattatttctctaaccaaaagccgcaaaaaaaaaaccctaaagacataatgtcttttaatcacttccaagaaaaacaaccaaaaacatctgaaatgttcagcagaaaggcggtgctcggcgctgacgtcgatatgcagatcatcgggccaactccgagaattgacacacgccataactttagctggaagtccggggattctgtacggagtataatgtccctgaaaaaaaggcatgaggggtctataccccacttccccagccccctcgcataaatgcctaatctccccttctttcgaggattgttctacgtacctagcactatcacaaagatggcttcccagttttcctcgctagctacactgctactcctaggatccttcctagtgccagtcagcgcgagcaagattcctgctcaagcgcagttgattgaccaaaaagccttcaatgtcctggacatgacccaacccccaaccgaattcaatgcgaagagtgtacgcgattcctcaattgcggtttccagtagccccttttactgaccgatgcgtagctatttgtgcctccagggtcgacaggagacagtctagctcagcggcctttccatatatacgacaaggaatttctgaagatcatcggagaagctccaactctaacccggatcgcacattccccaaaggaccctctattccatgaagcagttgtatggtaggtatccaacacggaaataagtccaggccaagggaaaatagcatctgactttactttctaggtccaaggaaacggacgaggtgttttttgtccaaaatgcaggtgctaagaacgccagcaccggtcttaaaaagtcggctatcattgagaggattctgcttgcggacgctgctgctgtctcccagaagtcggatgccgtgggccttgtggatgtaaccaccattccgtcatcgccaacgattctcaatccaaatggtagatgaccagctcttttttggtagttaaagataactaacggtgctcaggggctaccaattaccggggacagatcatattcgccggcgagggtcaaggtgactatgagccccctgctttgtgggttatgaacccgagaagtccattcaacgctacaggttagtacaaaccacctctttgtattcctggattaacaaagcggtctgtagttatccttaacaactacttcggccgccaatttaactctctgaatgatgtcgccatccacccgaaaaacaaagatatctacttcacagacacaatctatggctatgtgcaggacttccgccctgcgcccggtctgcaggatcaagtgtaccggttcaatcccgagacaggtgctgtgaccgttgtcgcggatggatttgaccatcccaacggtaggagatcaagaatttgtacaagctcaaaaaggaaagcgcaactaacaatgtaacaggctttactttctctccagatggcaagtacgcatacgtcaccgatactggaattgatagcggctttttcggtctcaatttcacccgccctgcttctatgtatgtgctagttttcgcgatccactgattggatttgaagctgattatagactgtgtgttacagctaccgattcgatgtgaaagacgacggcacactcggcaatcgcaagacttttgcctttgtccactctggtgcacccgatggtaagttgggcagtcaagcaagctgaatttatgatgttgaggctaattcttgaaaaaggcatccattgcgattcatggggtaacgtgtatgctggctgtggtgacggcgtccatgtctggaatccatctggcaagctcatcggcaagatctatctcggatctggtacggcgaatttcaacttcgctggaaaagggagaatggttatctgcgccgagacagacctttactatgccacgttagccgcggctgggaattatgtcgacagtgagatgtgagagccagaggagtggctgtagctttctatatttagtcaaaaataattttgggtgaacaggaatatcataaacggcagtcattcggtggttcatagaacgaagcgttcgctaagaactgaaatgttgctatgaatggatttaccagacttggacatactagtaccaattatacacttgaactgatttctccgtagatcgaagatactactattcaaagtccatgctcaatagacatcatgtcttgataatataacgatggcctcgtggggccattaaaaagaaggattccatctggctgtcatgccatcttttgtagaaaaaagttcgagcattgggcaaggctcggaagaaaagtgccgttgctagacggagctccattcaagctaggtgtatacccaaacaaactataacaattagctctattggtgactcgactcaagcattcgaaatgagtctccaaatgtgagttcgccaatgatgtccgtggccatgaacaaccaccatttgaacacgtcagtaacgccatgagctatgatatccattgtaattttttccacagctatacggacacgattggctatcagtggctcaaggcgagctagcgaagagtcagagatgggtgacgctaaaagacgccggcgatgggtatggaagtgtctgtcagtggttgaaaatacggtgggttcattgcctatggccagcttgcgatagaaattagttttagagaattggctattcgtcttgtgggtctcctttactgcgtcagtgtcgcagatatcgatctgatctggaatgattcggacagtcgggcctacttcaatgtcaggtatttacttctcataccgataaatgctggcagcacatacaatactttccatgaagttgatggatgtacatcggtaccgtcccatttaaccaattgtatgtatagttggcatcggtgcatttcgatatttcgggcccgggtatatgagacagagaatttgtgagtctacgatagatggtgctctaaatttcgtatttcagtaagacagtaacattgcatccccgtacgaggagaatttgttataccgaccagaagagcagcaccaataatgcatattagccagtggctaatcagaaaagaagtagataatatcccgagtagctccattatatgctttggggaagttgcttctgatatggaatcaagcaactattactactttcgaaatggtgtgctcgtgccgaattccgatattgcacacaacttccagctgtattattgacgtccttggtgatttgttatttctactattgttggcttgggtgtctaataggttggatgctcattagatcagatcattactacatggtggaatcacacaatatagggtttaactggtcttcacggctggggatggtcttgacaacgcctgtctcgtagcagcattattgaagttgtttgggttgattcatagcctcataggattcccctcatatatgcaaagattgacgattttgatatgaactgcccgggtggtctagtggtatgattcgcgcttagggttaacccaaagcattaatgcgcgaggtccccggttcgatcccgggctcgggcccagtcatcttttttttctttttctggtcctttacagcatctggagatgccacagattgtccatgatttgaagggttaaaaggataccctttttttaacttgcggcacacttaaaactttcactaactgctttaggctattatagattgcggggttagcgccaagtactttctaaaagagaaagtcttgtgcactactccgtacttggagacgtactaatggcggaagtcgttctctatcaggggaaagagagcctttgctgaatgatccttaaagttcaaggttcaattatgctattctacagtcgctggatttttgctttcgtttctagtcggaaaaaattcattgccatatttactcacatacgatttccagagatctatcataacgataatagcgctttagtctgcgagaactagttctatctcgttggaagagggaacaaagatttgaggtctgccaccattatcatcatctgtaaagtccgacctcgtgctttgaccatatcccctgaaagtcacgatagtatcagcatgggttccatctttagtgccccaatcccaccacccaatcgttgcgcccttgaacgcaaatcggaagatcgcaccagttccgagatgatctgggaactcccagagctcatcatccaaggtgaatgacccttcccagctctcactcggatggagacatacaaagtcttcactttgagcaacgtgaatcttggaaggttgatcattcacaaaaccgggacaataatcaccatatctgcagggaatccactgttcgctgccaccctgaacccgtcgatctaattgataatttaattcatcacggaagacatcgatgaagaaagtaagggggccggcagtggtgaaatttatattgttgacaccgtgatatgtcattttgtatcgaaatttcatgcttatatcgccgttttgtcgcttcaattctgtggagccattctcggtttccagcgacacactaagtatgggcacgttgtgtctaatagaagccttgcttttgattgttgtcagcataaaattatatatattctagactgggaaagcaacgtactccgaaatttgggattgggatggcataatgatctgtggccgggaaaatgtaagtgttcagatcggagcacggaagatacgtccagagtcatgggacctcgtactcgtaaatggttagacgaatgccgtgatccttatctggcactatgtattattcttttcgcccattctgtagtcggatttctgagacaagcgtctaatcaccgactgcaaatattttcttgcccgttgacccttatgctttcatcactataggtcttgtgccacttggtgtctattcttgtttatcctactgatagcgtgaaaagtgtcgaacatgcatttttccaacagtgtcctttccttgcattctactcttgcccagtttatcacctcatctttttgctggccgcaatcatcgcccgggttttagattccgcttattatctcgcgagtgagactcacgttcctaggatcatatctggccctaggacccatagcatggttcttaggcacgctcttggtcgctccatggatcagacttgtagttcccagagattctacagctcccgggagtggagaatagagcttcggggaacaagtgggttcccaaagctacagtgggatcacccatcggataatatttaaatcaatagcataaccatacgttctacatctgttcctggccccctaagcacgaaccccggattacgagggccctccggaattaaaaaatgattcccagtggggcataaggaatctgtgataatgaacaataagctcaagctgcatgtgatacacgctgtctatatgagatggatgctggtgctagctgcggctgcgcgaagggtgtaccgtgtagcgaagtgtcgacgatgaagagctgaggacttctataacgtcgaagaagtagcagcgatgcaagagaccgggctcacgtaacctcctgaggtgctaagattacatgatagtgatactgatagagatgaatgctatggaggaaggtctgggctataagagagccaagtaattgcttgaacaggtagtcagctacctaggtctctctcctatgtatacacgacgtagggagtgtgacatatggttgttcttacttttcctcttcccttccaccctcttgcgctgtcttttctactttctttgttaagcctttttcttgccaatgcagcattttatccaagacataacaaaactcatggtctcgtcaattccccactttgaacccgtttgaacccgtttgaaaatgcagcactggcggtctctctccccctcgcccggagatggagcccggactgagccatttcttttatttggagatatccttactcccggatgatgaggcacttaccaatcggtactgcggagggctgcggcaagcgtggagtttggagacccgtgaaacaatacctagtcatttagcagtccagtatttcccgggtatggacggagtttgctaaacggggctgtcttttgagtgattacccacgagatgacagtgtcaccattggtgaggaaagttaccattttcgaattggcaagccgaaggaggaccgaagtcatgataatcggattgttgaacccggacctcaactctatcaacccatgatagagttaattcactacattcatcttcgtaatatgcctcaagcattagaatatcgcattcttaaagccttggaagcataatatactgccagtgatctagaaatatcgcgttattagcccgtacatccagagggcgtaaatttcgaaacgaccgtaccgttgtccgtgaattataacatgcttctaggattcctattttagctatttccttagctcgctcatgcatatccataatgttatatttaactatacgtatagaagttgaagaacaaaaaaagatgagtttttgtattgatttcggattttaggatatttgtgcgggatctatgtatacttattgttcttcaacctaaattagcgaaaaaaaacaagggtgtggttaatatgggcaagtacgttctatcggccgatctgcagaacttttgcggccctcacatattcttgccatctaatcaaaatgacatttcgcatgacgcttttagcatttccatattagattccttcaatttaaaaagaagaagaagaaaaaagaatgggcccgagcccgggatcgaaccggggacctcgcgcattaatgctttgggttaaccctaagcgcgaatcataccactagaccacccgggcagttcataccgagaattcccacatttgcctacaagagactcaatggaatttgctgacagcattctggaggcagacccaaaccacaaagtcaaacgctacccagcttacgatccaagccaagacaatcaaaagtattggcttccaagggttggccgtcccgtagagaagaatcttgttaagttggattgatcaatctagtgatgtcaatttacgagttagatactactagtggatctcttaacagcactgcatggggatctaggtatctgagataagttagcttaatcggagggcagatcttctcaaagagctaccatacactaggggcatacataaagcacacgatgaagctaaataccgttctgctagaaagatgcagagccgggctttcatgtagatataacgaaaggacgtatgtacaggtgttgaccagtccgagagcatgtatttacgcttgggtattggaatcggcctttatgattcatattaaaagctaggccaagttcaagaatacctacatatagtatgagccactcgcgctatacgacaaggaaacatacgtgagatagagcagcttcctcgtagaacgaaaggttatgcacgagaaggctgcttcaatatcctgcttttacaaaattagcagttatcctgtatgcgatgcactggtctaagatctaccacaggtcgggcccaaagaagtcgaagtcatatctctgagtccgatagagctcaggggagtatcgggcaccttgtaaattttgtaattagaatgccctcagggctggccaagaagcgtgactacagttcatcctgcatgtctttttgctcgagttgaactctttggcgggatcaaggtaatgcggtcgtccgtgtagaaagagccgggctgtgagataccccgacgaatggtcttggtcaatgaactcaaaatgtctccttcccactttccgtagtcacccaatttcccaagtgatgccttgatatctctccagatttgacgtcactagaatgatgtttccatagcatcccttgtgacctacaacagaggacccctcgcgagcgtttcttgcatgtggatgtggatatcgctggccgggtggataataccggcgtcaacaatgggttccagtggcaatacgaggaaaaaaagcagaatgtatgaatgtattgttacgacaaacattccatcccttcttctccaacaatgcccgagatacgaggtacgtaccggcggcgttgcgagagttcttcgcgggtttcgccgccaacggtgaagcttcgatcagtactccgtacggggcattctcgtttcccacggagtcacgggtctcagtggagtccgtcttgatggcaagtgcaaaggtactgtgaatcgtgatccatcaacacacgagaagtatccgggtctcctctttccaagaacaccagcccccaaaatatagtcttcgaattcttccgctttagattaaatcaccactaggatgggagtaatcagccgtaagcttttattcaattggccaaagagatccgaacaaactctggggcatggcgatctgcggaatgagctcataaagacgttgtggggatcgagaatgacgtggggtatgcagcaaaagacaactcctccttttgctcacgagtcatgggatgaggagttcgagcgttcgagattccaaagttgctttccgttcatccatgtaacctcggatggagtttgttacatccaagcgaagggccggtagtcatagtgatagctccgcactccgcactgatcctcttttagtaccaaagtttggaatggatcgaatcgatgatgtctcacctggaaaaggagaacccctagtttttctatagtgccagtggggggcattgagttcactagcgattgcgaagatgtggaagcgcattgtacacgaagtgattaaaacttatattattatgttctatcatgagatctattatatcattaaccaccaaattatgtccaatcagattatgtccaatcaagacttttcttctctccaacaaatctttggcttctccaaatgttccaacttttttgaagagaaaaaaatgcaaaatgcaaaaagtccttacttggccggggccgggctgagcttcgcacgtagtcgcgctccgaagaagaagaagctgtagggaatgagaatcatagcaagaccaatgaaagcaagcagccaagaagcccactgcaagccgagacgatgatacatttgcgtagtgaacagcgggaaggctgcaccaccaccggaacgcaggaagaccttggctgccaaggcggatgcagcgtacttctggtaagagtcgatgatgtagttgttcacagagtagtagcacaaaaccatgccgtagccgaaggcaatgcccgatgaagcagggccgacccaaatgatatgcttgtaggaggtcgcgcccaagatgaacagggcgatcgggatgaaaggcgaaccgagcaaggctccgtggagtcggtcttctggtgtgggggctcgcgagtcgcagattctcttgaacttgtgctcgatgaggggagtggtgaccagggcgaaaccggcgccaatcagaatggggatcaacatgaggccgatctggccgtcgttatagccgtggagctcggtgaagataacagggtatgcgaagaagaaggcgtaaagcatggcgtaaatcagcacgatgtacatgcacattaggtcgagaacgggctcggtcattatcatagtgatcggtcgaatcaagctcgtctgagcgatttccttgaatgtgagcttcgtcttttcttgctcggtgatgatgttggggtttccagtttctttgcggagtctggcagcgcggcgcttaagaatcacaggggcatatgtctccgggacaaggcccatcagaaccatcatgagaccggagaaggccaagttcacccagaagaagaggtcgaggcggccacttccaacgttgatccaacctgtgacgatggggccaagcacagggccacagtaaggcgcagcagcaaagtaagcaatggccatgccgcggtcctcaatgttccagatatcggcgatagtgccaccagcgagggaaagacccgaactagagaagacaccgcagaggaatcgacacacaagcaagccaccgatgtttggggacagagcgcagggaatgttgaagatggtatataaaagcatagagatgatgtatacaggttgtcggccgatgatctcggagaggggagaccagagtagaggaccaactgcgaatccgcagaccatgatggaacatgtcaggatagcgacttcgagagagacgtggtatttgtcttcgatcaagcccaatcctccggtgacgatggaggatccgaatgcaacacacaccaccagcatcgaagcgaccatagtgatgtaccagcgatagatgcgattccagttgtaggggtgttcggggtcattgatggtgaatgttacgaactcggcaggcccgccctttcctcccttttcaacgtcgacgtcggcgtcattgtcgtttggtggggcgccgccgtgttgcgtggaagtcgtcgaaacatgggttcggatctgctccagagttgtctggggaacaagaccggtattggtttccacggtatattcctcggggaacacagggtcctgatcatgtccaatggctgggtaattgtaatccaatggtggaggaacttctgaaatgccgcggtcggcgagagtctctctggtttcggtcctggataggcgggaattcaaggcctcgagacggggatcgagactgcgatccaagggctcggggttctccccctcttctggtattgttgagggcatcgtgagtgtgggagattaattagggtatagaaatagaaaagggctgtcgagcctatatatgagtggaaggactgttgagtctattggaacatgccaggtacttgaatgtaacacggcggatacttatactcccaaggtggctttgtgagagtgtcatacttttcaaagccgacgaatggccgaattagaccggacgatccccggaaaaagggcggaaaaaatacgagaaaaagacgaaaacatggcagaaaatggctcagaactgtggcaatgggggcggcaaaatctcggtccgagtgaccgccgacctaattgaaaaaacgacccacggatttcggagtctagcccaactttaaattgatgatatcactgccgatatgccgggcccgtgtatttggtgtattttgtgttttgggctgtgaaaatttcaatccgatcaggttttttagaggctcgagctctctccgccctggacgtgtctgaatgtgtgacgtgctcgacccaggccggacccatctcaggcgggggggcatggcagaattgggatataaagtccgtcttcgaattccggtctggggtttgttcatttctgttttcgaaccccataccatagtgaattcattatacggagtagtactgacttccatagcttcctgctcgtttaatccccgtcggggatgataccctatcttcgtacttattttccgtcagggcattcttcatttgggacctgatctcatattgacgctaagcagaagtccgccaattgtcgctcgcaaatctgacggcattctaattaaactttcacgtttcatttggatcttcttctgaaacaaaaagaaaaggagaaatatcaatttactgtcattcgcattcaaacgccggtatgctaacaactcattggataatctgaccgttaccacgagaggtactaaataatgcctaactcgatattcaaaacaatgcaaccttgcttgaattatatccagacaatattcctaatcctttatcgttgctcctttattcagctatcgatctactgctgcaaggatctcaatcaggatcgcccgctatgtatgtacataggtacactatcataactgcacaggtgggtcagtgaacagaccttaaagtgagacgaatctccacccattgggccgtaaaaacctactgctactaaccacaactgctattcagataatgataattgagctgtgaaggccgatataagccagtatctctcgtagacgaattcctggcactacaagatgactagagttagccgtcacctgtgtctggcttcaaattggcaaggatcatttgtaataataaaattggtgccctacggcttacgtgtgaacagaaatatgcattcgtacactaactaatccgtacacccctatatctctaacatggtatatactccgtgttgatgttttggtgggtcctgggcccaaaaaaaaaaggaatggcgccacccggaatcgaaccggggctaacacagatcattgttataccacaatgtgtcgtcataccactagaccatggcaccctattgattgattgttgacaggaaatactccataaaaggagcttcatcgactccacaatataagcacaactacatcgctagttaaaccactcagttgctattatagttgttagatatatgtgatgtaaatctaaatgggttccagtcatgactttaagtgccttacaaaatgctatgtcgcttatagatgttcgaaagagtaagttggttgcagatatatatctacggggttggagttatgtcacaactttcacaatttatggacaatcaccggtggatcatataaagtaactatttgcaattgaataagatcaagtccccatagaaaactcaaacagcacgcatgacactgcaattattccctcaacatgtatccagctgtaagatgaaacaaatccgaagaaacgacctacccgacccaaccttaatggtaccctcccaaaggtcatgagatgctgtgtatagtgataagctcagccacatgagccgagtagccgggtatgtattggtttctatctaaggtatgcaaccctaagtaatctttgttcgcttgttcgtaaacccagaatctggacgagatcgcttccgctccgttgcctccatttcagctctcataatcctctcctgttcagtcatcttcctaggagctgcgaatatagagccattcttcccagccaaagggttcttcttagccatagcaaacacgttcttcggcttttgtgcacccatggacatcgaaatcttgaccggtgcggcaggcgcagacgaagcaggagcgtcggtgcttcctgtcggtgcatctgtttcttccagcgataccgtcgtcgttgtcgtcgtaggaggcgaggctggcttcgtatctgtcttcttcgagccgagtccaagattcaaggtcatcttttctccttccttcctctgcaataatcttgcctcgggttcagggtctgtcgtagtgccgctagccatcgccgcttgttgggctcgtttgatctgttcctgaattaaacgttgctctcgttcctcgtctcccttctcctggcgttctttctttaaaatggcctcccggcggcgaagtgtgtctggactgttatcaatccatgctatgaccaatcccttatcggtttcctcaacccgacactttccctcacgtcccaaataggccgcaaactgtgataagcttttccattctgcctcggaggttagtattagtccttgcctctcctctccatcgggacatacctgtgctgttcatgtgaatgtgctacaagaaagtcagctagaacgaacaggacaacagtgtaatacaaaagacatacctgtttatcagccacaatctgattatagaaatgattgacgttgataggtttagttccatgcgtagttctgagggtgtcgaggaaagtgcgctcaaattcgcgactaaactctctgatgtgcttgcgcgggtcttctccaatgagcatcatctgtcggactaatataaagttagtcggtggccaggacagaaaagagaatagagaccgtaccatgcgcttcagtcatagtgtgacatttgaacccgttctcatctcgacattgtttctcacatgcctggcaaaaccatcgaaggcgacccaatcctttgcttttgatcttgttgccgatggcttttgtactgcctggttccgcacgacccattttgtaggtcggtaaatgaaattaacgtaagcgttcggaggaggcgacgagacaaaaatgcttcaaaggaccaatagatcggaaagatggtgtatgttgagaagcgtttgaagaaagtagtgcgagaagctttgaggtggcgcagatcaacgcgataagccgatcgattacataacatatcacatgacatagccaaaaaggcctggtcccgagcttccaaaattggttagttgattccttaattcgatgtcgatatggatgtatacggagtatcagtggatgaaacgaagctgaatacctaggttcattgaaatattccgacaaaatgaagcaaaactcccccaaatcctacgcctgcatcccgatatcgcttttctacctaggatcatagcgtacgtaaagaaagatgtattccggagacaaaccagcaaacctcgccaagacgaaggtatgtagcaaaaaaacaaccaaagaaatgtgccatgaaccaagatggatattaaatcaccgagtctgcaagtattacaagatgtactcgtggattgcagacggcccgctctcgttgtactcaacacggctcatgtaacccttgctgagaccctgatcaatgacaaagaaaaccttggcggccatctgagcgccgaggaaaatggcctcttctattccatggccaccctgggatgtgccggacgctcctgggttacccccagcactgccaccgctggcgccgggagcgttgctgttgccctggtctttgaagtccgggaaatactcaggaagctttagagtcttgactgaggttggggtttgggagtggccggttgagcggtagtgtgacaacatgccggggtccatggagggcgtgccgggcataccggggttgttgtgagttgcagccacaaggagagggtttactccagctgccgaggggtggtacatctggccaggagcgggtgtgttggcaccggttggaagaggggtggtgaagttcgaaggaatttcagacgtgaagatggtgccggatggagaaagtatgaacttttgcgtgatgacagccagcaaggcctgtgtgaaacctgttttaatgttagcgaaataaccgaactctagatagcaatgataaaacatacccttgactttgcttccacatccaacgataattaaagagtcccaaagctcgcttcgctttgtagcatctggaacggcaagaatagtgtggtgaatctgagtcgcaatgtcctcgaggataccgctggtcaagcggtttccaaccttcgagcgcggcgaagtcaaaagaaaacgctcaacactgacttcaatatctcgagtacgacgagtgtactgccgagcaccgtgggctgcagccttctctccttccaccggaacaaattcctcgaactggaaggacgccttctcttttttcgagttaggcaggcgggttcccttggggtcagctgcgcctttcttggtagttgtcttctccttctcgacattggcaaggtattcagtggggttgccgctgacaatcgcagcgacatcgagaacaccctcatcatcgtcaccattatccccctctattcctgtctgagtgccgtctcctggaccgcgcggagccgactcatctccttctgatccgcccgtcgaggcaacagcagcagggttggcgccctggcgagcagtagcagaggaaccaggcagtggggttcctgggggaagaatctcagtaatattgcttcgcttgagttgctcgcacatctctctggtaaatcccttcggacccagcagctcaacaagacgatcggtcatagcgtctccaccacacccctccagtgcgattcctctgccgtgttcgttgaccgcgaagtcggtcacagcagtgacatcaaccttgccctttccaacatcgacaacagtggcggtaggtgtaccatagccgtagcaagccgcaagagcagagtccataagactaaacgcgggtgccttaaacttctcgaagacgaattgagtgatcgcttcgcgatcgcgtgcggaccagacgggctgaccaacaagcataatcggagtgtggaaaggtgggctcaaggtattgtggatgtgagtgagcagggcgaagaaacagggccagtcgacgatgcgcccgttctcgatcggatagattgccccttcgtcggatgccaggtcctcctcgtagaagacttcttcaatagtcttggttgactcgtcattattctgagtattttcgtcggtcttgacagtggtcccatcagcagcggattcagcgtccttcatctccacgtccggctttgtgtccgtgccattgttgaccttgacctcttgacgtctctcgagaacacggtaaggctcatattctcccttcttctcagcagggaacatgcgcgttgggaaccgaaatcgcgcgggcgtgaatgtttcaggcaggccgagctgcgccaaggtcatttgcgaacccggcgcaattagctagacgaatggttaaaattgaacaagaaaatatgaagaactaagcttaccaagatatgctcatccttgaagggcggcatcgttatcagtggcagtgacgagcgttgcgacgagtgatgactgcgagctccgctcgatttgcgttggttactctttcttcccattgtggtttagcgtgatttggacgaatcggagtcggtggttggtcggggaataatgtttccgaagttggagagttgaggtctacttctgcgaggtgacaacaacaaaccgcgatttacgcagccagaacgtattaactctggaatattttgtcaataactataggtgatttgttactttattgaatttaggattgtaaaatgaataaaaaatatgaaaatgatcgaacatgacatagctatactatttacatagacaggatattacgcagtacaatacaatatacacagaatttgtctataagctcagtcagaataagatctatagatatcctccaaacatcatgatggctagcaaactcggttttgattgaatatacgttgtatgccgttcggtcttctatagagaggtagaccatgcctgtcaaacattcaaatcatatgcaattaactaatgcattgtgcgctttcacgccattaatagtatatccgcccacagcctatccccctaaagcagagaaagaaaaaaaaatctgaaaccatatgaggaaaaaaaactccagacccacatatccggtggaacgccatcatcctttgcactctatgaccagcacgagtctaaggtgattctattctgggacagcatggtatttgtcagtcgctgatcggaatagctcctgctgttgccttagaagctcctcttctgtcagaccactttgctccatcttgctctgcttcttctctcgtgactataattcagatgagaggtcagcctgcgctcgaagctatcacaatcccaagaaaaatatgaacataccttcagctgctgcttatgctcttcggcaacagcgagtacatcggcaatataatcactgaaaccgagatcccgtaatgccttctccacatgttcacaagcgatggtcttcttggcctccttctcgctgatatcgtttgcttcggaggagatcagtgtaataaattcgacacagcattccatgagcaagtcgcgcgcatccttggagaaggtttggccggagctaggtggtaaaatctcggtgataatcttttggaccgtcgctattagataagttagcaaatgctaacaaacacgtatgacaagtgtataggcggtgaagcggtaagaacctcaaaaagagctgtacacattcacaaggttattgtaccgtacctttaggcagagataggtcatcgtttgctattcacgtacaggtcagcaggttgcgcgtaggcggccaagatctagagatcacttacagttgaattctcggtcagacatggcgaatcagatgatatagtgatagacaacaaaagaacaaatgtcagatcgagggagaggcgcaaaagggatgctttaatttctttgatcttttgcgtggggctcaaagtttcaaggcccatcgcaggcgcgcgacggagttaagtacaatttcttgccggcagaatactaccgctttggaccacataaattgcgctgaattttcttttccgttgacatcttcttcatcagtcttcaatctcctccaactaccttggaaagagtccttcaaatgagatcgactccttccgaggccacacactaatggtaagctcttgttcaaatcccttttcccaatttctatcatgatgaactttgcttgtcgcccctatcatacattctatggtgaccttacctgtcctagccaaacggactatctgatctctatcaattctgcacatttgcatctcacttcatttgtttgaaacggttgctaactttattgaagaatttgcaggaattccatctcttgttattgtagcttggaactcgtttctgcttggatgacatccacagaacacatttggaggacggggatatttacatctgtatctaaaggtacgcgcataatatttgctatattttcagttccaattacatgatgtatacccttacattccatgctaaacatgaaggtgcactgcgcctaatgcttataaaatgtattgcttttcatctttcgactgacttgtaaaccattgctgcctcacatttacattcattgttctatggcgatcgttactgacttgctataaagattacagatatgaaccagaattttatactagctatcaatgatattattattcctggaaaacctcgagctccttgtcgttccatctgccaattattagtatttctcgcgtaatatgtgtaggacagcacatacgaatagaaacgaccgctgatttccttgggcgcatcgagtaccagcttggccatgacatggccgggctgctcgggtttgaggagcttgccgttcttgtggactccagtgaacttggagtgcatttcagcgtccaaggctgtgccatggtcctcccgcagggcacgctgcatctcggtgtcgaccataccaggtctgatagacacggaggtgacatcgggttcttcggcacccaggctcatggcaaagttgttcatggcggctttggtggcagcatatagagcccaaccacggtaagcgttgactgcagcgccggaagacgtgaagataatttttcctttggactcacggagagccggtagagccgctttggcctagttcccgttagtagtgcatggtagatttgatgtaggtcccgtacaaaggcaactaagctgataaagttgacatcaaagccttccttccactgctgcggatcagcgtcggcgattttgccgacctggcctagcaggccgtgattaaggaccattccatcgagctgaccgaaggtcttgatagctttatcgacggcctgttgggcaagagaaaagtcggacagatcgccattcaggattgccacctggttgccgtattgctccttgagcttttggaggggttcaacgctgcgggctaccaccaccacattgtgggattgaggtgcggtgagcagatacttggccacagcaagaccgatacctggttgatgtcagtctatcattatgcacaaagtttgaggggtgtacctcttgaagctcctgtgacaatgatggttttggctgccattttggtaaatgctctagtcactaggtgttagtggtaggagatcaacacagtgacaaatgtaaagagtagatgctagattcgaaatgatagcggcaatgagaatgcatgacaacaggttttggtattgctttgtatgccaagagacttgcataaacttgctcaagttgtctcggatatatatctgaacagctctgcaaagctaagaactcaagcattggggaatgctggttgggcagctggtgtaacctactcgatgtttattctgcagatgtcttgagccgaatatcaatactggtaaggaatgattatatgaagatggacacattgacagagcaccgagagaggtctagtgcggggcttattaatctcgtggggtcgatctcgggacggtttccctatatggaaggccgacggacgtcatgctgtatgtacatctttcgttttatagagtagtgtatataaaatggaacctatagtaaggcgtattcttgagcttcagtcaaagtagccgtgtattttgcaattcaaaatgagagattggaggtattcttcttacgtaggtagactgtgatcgtggcgcagcaggcaaatagcttcaagaaataactttaatttaaagattacgcttaaagtttaagatgatacatcataaagccgcacatcccgcagcaaaaaaaaaggtagaaagaggcgttgctgtcacagtggaagcataggggaagagaacttgaccgtatagtgtagctacggcagccacccaagaggggccggtcacgtggtagccaatttcagagaaccggtccgagagatccacccgtcgataggaaacactttcacgatcgcccaaaggagtcaacttttgcgatcagctccttctctactccacagtatttttaagtttggatccaccggtagcgtgtaccatcatctaaaagccatggaattcctcccggctatcatcccagcacttgtacatattcccgggccggtgcaaaagaaaccgggaagcaagatcatagattgccgagaaatataagctcgaacactcccatttgcatgcattaattgcaacccatgctttatttcgacaatccgcgttgataagcgtttctaattttgcacctacaacagccagcatgtcgaccgtcatccttggaggaggtatcattggagcctcaattgcttactacctatctgccaaccagccagaaggcgatattcacatcgttgagcaatccccagagcttttcaccgcagcctcgggatatgccgcaggttttttagctagagattggttcgagccatctcttgcccctcttggtgctatgtctttcgacttgcaccatgagctcgccgcagcggaaggcggagacaaaaaatggggatttatgaaaggaacagcgttcaacttggataccgtcgctcaacgcaagcgagggggtccccgcggtgatgattggttgcgaacgggcactagtagagcagagactgcggctggctccgaggataccactccggttgagtttccggaatggttgacgatgcagaaagagggaatactggagaaaatcagccagggtgaaaccgtggctcaagcgtgagtatcaaaccgaagcgtttcatgaattatttgctaattgtgttcagagatccattgcggctgagccaattcctcattgacggtgctatctcccgaggcgctaagcttcataacccagcccaggccaccgaagtggtcaaggatgcgagcggcacgattacaggcgtcaaaatcgtgtctttggattccaagaaggaatcaataattccgtgtacgaaccttgttctgagcatggggccgtggacaccacaggtccttagagagctgttcccctcttctcaggtatcattcgatataacgcctttggctggctattcattggtccttcgatcccctcggtatacaatggagcacgagagaaatgtttaccgtggaagcagccatgctgtatttacaacacaccctccgtcgtgcgggtttagcccagagatcttcctcagggaaggcggggagatttatatcgccggtcttaacaaccccgccatgaagcttccaccccgtgccggtgatactacccagctttttgatcccgccgagattcgaaagctcaaagatgttgcaattcgtttaatgggggatcttcccaagggtacaaaggaggctaccgacgagaaggccaacacagatgacttggagattatccgtgaagggctgtgcttccgcccggtgggaaatactggtgttcctacaattggaagaattggagattactctttgggaagtgtgaaagcaaaccccaagggaggcgtcttcatagccgctggccacggagcgtggggaatctctttgagcctgggaactggaaaggttgtttctgagatgatcaaaaagcaaaagctctctgtgaatgtgagcggcttggcggttcaggacaaagttcctagttccaagctgtgagcatttgatctgcaataggaaagagctccagatgtccgcctaaatgtgcttttccaaaggtcactgacaaagcaacattgtagctgcgtacttctttaatctcatcgatttcatcctctgagtgcgcacatattgactttcgaaggctcccttgtcggcgttaacaaagagcgatcatcttcgacttagaatttcaatacctatttatcaaactaaatgtcgaagagctcaaaatattcgtttgatactaatacgatcagattggtagactcgacttggttatacactttgagtactatttccctctattttccctctcctttctttccctctcctttctttgacctatgatactggcttgtaatgagatcaaatcaaatatctatctataactcatctccatctcaagtcagtctcgccccggttctaaacctagcgccagcatcgggagtaaaaataggtagaaagtcacaggaaaaggcagactaagtttgggactgcaggtacgctaactcactatgtaactaaccagttatagctcttcctaagtaagctgctttgcctaggtgacagtttcttttccaatatctctccaaagactttttttggatgagttttttttttaaagaatactatcaaatgtttcagtgttatagccagaataatacaataaggatcagccgtgaaatatagaagatatttgggtaaaggtgtgttcagatgtatatctaggaaatttactaggcgtcggagtatagataatccgacggaccgagcagctctccgccactcgagctctccagaatcttcaagcatccgatatctcccagctttcaaagcaccgtcgctttgtgcctgtttcttctgcaaccctcccatccaatttcaccttccatcaattcttcatcagccaatatcagagactgcccgtaatcaaccatggccaactaccttgcatccatcttcggtaccgagcaggacaaggtcaattgttcgttctactacaaaatcggcgcgtgccgacacggcgaccgctgctctcgcaagcatgttaagccttcgtactcgcaaaccattctcatgccgaacatgtaccagaacccggcttacgaccccaagaacaagatgaaccccagccaaatgcagaaccatttcgacgccttctacgaggacgtatggtgtgagttgtgcaagtacggcgagctggaagagttggtcatctgcgacaacaacaacgaccgtaagtagtgctctcttcaaaatttgtgtctgaatctactgacatctgttttcgcgacaatagacctcattggtaacgtctacggccgattcaaatacgaagaagatgcgcaggcagcctgtgacgcgataaactcccgttggtacgcagcgcgacctatctactgcgagttatcacccgttaccgatttccgagaagcctgttgtcggctcaatagcggcgaagggtgtgtacgagggggcttctgcaatttcattcaccggaaagatccgacacccgacctcgaccgcgagctgcgactgagcaccaagaagtggctcaaggagcgcggcagagatcctcgcagcgccagccgcagtcctagccccgagcccacccggcgcagatactagtggtgtgccacgacgaattttctcattgttgtttccctacattcgatcctttggcgttcggcgatatcagtcggtggttcaattccactttcctttgcgcagcggcgcatccagggcatggggtctcggtttgtctttacatttgctggttggcatttgcgtttcatgatatcaaacttgcgcgatcaataaaacccacagctaaacttcatgtataaatctcgcttagtaattccttatatgtaccacctggtaggtagttgaagccgaaaccagtacgttgaccagcacctactgagtgatatcggtcaaggaaactgattcaaagctctctctatagcactttgaatccacaagtcgttgtcagaaaattgcaattgcttcattactaattaccaatatttcaacaacagcacgcgcaatttgactaggagaggtcgacggtgcagtgagctgtgcagtgtcgcggccgtagtcatagatgtcgtggaagtcgcttgatgtttggctttggctttgacaccgagattgaagcgtcgtatgaaaaggagtgcatgctcatagtcgtaatacatcgggtcactcgaagtactgtttcatcttcggctttttctatcacacacataggcagtgcctggtgcgatgcgttttaaaagtctaagtagatggttacataaattatgaatccgcctcataatctatcttccgcccggatggtctagtggtatgattctccgtttgggtttccatctcaaattcggagaggccgcgtgttcgaatcgcgcttcgggccctcatctttttttgtttttgctccaaagttctttacttcaatgtatgaaccagcgcacgcaagtaaagtcaagtagagacaaacaaatcgtctaatgctatcaaaaaccatctcatacgattcacaattagggtggttttctctcctcgtcactttttgtatgaatatgcctcaggaaacaaatttactaagcttccttatcgcatgttcttatctttctttcatctacagccacgcgagcgcgtctgatcgcgtcaaagccagtacgccgttggcacaaagagccttgaactgactgatattgtgaactctgacaccctagagcatgatttatggtcgagaatatggctggatataatgacagcaatcgtgcctttctccaagcgttcatggcacgttcgtctatgacctttgaagatgcgcaacccatcctagctgcgatattaacagtatctggtacctaactcctgcttgatcatggtgctatgaataacggtagttgctgacgttgaaatgatcgaacagaagggcgaacagtggatcccgatgagattgagaaagaccaattctccgactttatagcggcggctaataccgccgtgtcacccttcgacctcgaaatcagaagcttactgccacaagtaatcgaaccagcccaacaagatgccccagccacacccccgaagcgagtctatgcgcttgtaaatactacgagtgatcctttgacacagctcgcgaccacctattccccggacgagatcgcgtttctcaagcgcttgctggacttcatgtttgcgaaaaataatacacgactgtgtgaaggcatggtagcttcacagatgcaagctgtttcactccataaggctccgtctggcgaacggcaatccacgagcaacgactcggcgcagtcgcaaaccgcagcggtacagtcactgcgtatgacccaagcagaaaccctggtcattcacttgattgaagagggctggctgcagaagagcgcgaagggatatcttagcctcacgccacgagcactgatggagttgcggggctggttggtcttaacgtataatgacgagagtttcgatggccgagctgtggagaggatcaaattttgtgctgcttgcaaagacattatcaccgtagtaagtatacttaccgctctttggtatgaaaaagatctgactgagatactccagggtcaacgctgtgaagaccgtgactgcaagggtcgactccatgaccattgcatgcgcaacttcttccggatgcaacaagcagagaaatgtcccttatgcaaagcggactggcctggcgataacttcgtgggcgaacgagcgatcacgaacccgaagcaacgcaacaccgttccacaacagaggaggtcttcgtctgctgcgtctagtgccgttggcgaaggtttggatgatgaggaggacgaagaataagagaattgaacctctgctggctggtgaaaaataccggttatgggtcttgcctctgcttgaccaagcgtcagttacgaaatgggttcaccgtggacacgcccatgtgaatagcaacgaatgaatgaacgacatggaagattatcgagcgaggattgctgttagttagtttgaggtgacatccaaagcgatgttctatgtcatgtctcgactgcattcttgggatttttgataaggctcaacctttctattttgttttaagatgtaactagatattggggattatgtacatgggaaggatgggccttgtaagatacaagcgggtacatacatgatcttggatgacctatgaaatgaagtcgaatacttgaagctattgaaatgcatcttactggctggcatatcttagacatcacgcgataggtgtctgaatatgggcatgcaaatatggtacagtggaaaaaccggcgtggtcgtggtaagttaggggaaaatacataaatgtggtacgacaaggtaaggtacggtaaaataaatctcaagccatcgattttctcttggcagaagcccaaggccttggattcccagtcctgtctcactccgtactccgtgctctgaacattcatcctttatctcttcaagggtttcaacctggtctttcaacaattgatgtgctgtataatccgctaccttccggcgttttgccgaacactttactaatatggaacccccaacttccccacaaacccaccaaaaccctcgagtcgcgctagacttcccctgcagtcgatgacgaggtcaccccatctcaagccgatttcggtcttcacagccaatagcccgattttatgtacacaatatcatcatattggtcgttgcttcccgcattttccgattctcccgtggcaagccgtcccacatacaagccaccactgatgactcgtacgccatttccccagaaccttgatgccaatcctcactagaaggagtagtataaccgacttggaactgagaacatccactctctgaccctggaacgggccagtaggcttttgactttacttccccacatttcaccatgcgttcatagctggagcgattttaaattgctactacatcggtatagggacgtgcctggatcatctcatgtcatgctgatttaggaaagcgccattaatctccatctttccctaaaaactcctcttgcttcctccatcatcctcacttatgaatagtgctgaccgcttcttcctattcaactcgatatcgacttattcgagcatctgacctggttgacaaagcggtgaaactgcaatatgcggtttaaagtgagtttgtactcctatgtccttgctgatcatctaacactctgcttagtccttcacatgcgcggcattgcccctatttctgaatcttgttagcggctctcccgacagtcgtatcaaaaggtgctttagggaacacacaagctctagctcggccaacttcagcaacaatgtttaccagaccggcttcgatggtgtgatctgggacgaagacaactggcttctgagctcaaccaacttggaacagggtcgttttcaatctcgaggatccgtggcgaacggatatctgggtattaatgttgccagtgctggtcctttctttgagattgatagtcccgatgacaccaacggctggccacttttctctagacgccagaccttcgcaacggtcagtgggttctttgactcacagcctaccaccaacggcagcaacttcccctggttgtcccagtatggagacgatagtgtgatcagtggtgttccccactgggccggaatcatcttggatctcggcaatgatacatatttggatgcaaaagtcgacaataagagcatttccaatttccgaaccacatacgacttcaaagcaggcatcttggtctggtcctacaaatggacgcctcggggcaacaggggatcgtaccagattacctatcgtcttctcgcccacaagctgtatgtcaatcaggctgtggtcgaaatggagattatcccgaccaaggaatcgaatgcgaccattgtcaatgtcattgatggagcttctgcagtgcgcagcgacttcgtagagaccggggaagacaatggtgcaatcttctcagcagtacggccgaatgggattgctaatgtcacagcttatatctacgcgaacctcactgggtcgcccaatgtggatctctcttcgcgcaagattgtgcccagcaagccatatgtccattccaacaaatcgtccattgcgcaatccgtagatgtgaagttcaagcctgggcaattagttcgtgtcatcaagtatgtcggaggtgcttctacggatgcctttgttgatccgaaacaaacagccaagaaggctgcctccgctgctatgagcaatggctacgcccggtctcttcgaactcatctcatggaatgggaaaacgttatgccccaagattcggttgaccactacgcatttcccaatggcacattgcctgcagatagccacatcattgatttggcagtaatctccgtggctaacacttactacttgctgcagaatactgctggcaagaatgcagtcaaggaagccgcgggagcaccgataaatgtggacagtatttcagttggtggcttgacctcggactcctatggaggccaagtcttctgggatgcggatgtatggatgcagcctggtcttgttgtttctcacccagaagcgtccgagcggttcaccaatttccgtgtggcaaagtatgcccaagcacgggagaatatccagactagcttttctggctcccagaaccagacaaatttcagtccgtcagctgcaatcttcccttggactagtggccgatttggcaactgcacggctactggcgcctgctgggactacgaatatcatctgaacggagacatcggaatctccttgattaaccaatgggttgcaagtggtaatacaaagttattcaaagaggaacatttcccaatctacgattcggcggctacgctctatgcggacttgctggttcgaaacgggtcttattggacattgaccaacatgactgaccctgtaagtctggcgcccatctctttacagcacccaaaactaatataaagtaggatgagtatgccaaccacgttgatgcgggtggtttcacaatgccactcattgccgagaccctccgacatgccaacgccttccgtcagcaattcggacttgaagaaaatgctacctgggatcaaatggctgacaatgtcttggtgcttcgtgaaaacgaggtgactctcgaattcactaccatgaatggaagcgctgtggttaaacaagctgacgtggttatggtcacctatcccctgggctatactgccaattacaccagccaaaattcgctgaatgatctggactatgtaagtattttgattcccggaaagagagccaaactaacaagatctagtacgcagcgaaacaatctgctgatggtcctgccatgacctgggctatcttttctgtcgtcgcaaacggaatgtcgctatctggctgctcatcatacgcatatgcgcagtactcatacaagccttatacccgtgcgccattcttccaaatgtcggagcagatggtggataacgctaccatcaatggaggcacgcacccggcgtatccattcctgactggccacggtggttccaatcaggtcgctatctttggttatcttggattgcggctggtaccagatgacattcttcacgtggatccaaatttgcccccccagattccatacctgaagtatcgtaccttctactggcgcggctggcccttctcggcgtggtcaaattacacacacacgaccatcagccattccacagaggctgccccactggagactgccgatcagcgattcgccaacaaaacaatcacgattcactctggccaagaagtcgataccaccatttaccatcttcctctcaagggctctgttgtcattcctaaccgacagactggatcggagaacaccgtaaaaggtaatctcgtgcagtgccaggctgtttcctcttcggatgcattcgaacctggccaattccctatttccgcggtagacggtgcagcctcgacaaaatggcagccctcactggcagctgagctaagctccgtgacagtctccttcgaagatgaggctggcgctatggtattcggtttctacttcgattgggcgcagacacccccggttaatgccactattatcttccacaataagaccctggaagatcctgcggcggcgctttccactcaaagctcggactacacaattgtgcaccgcctgataaacatcgttcaatcgaacccatacgatcctgataccacaaacctcgatagggttgccatccctaccggaaacacaaccaatgtgactttatcatctcccataccagcagcacgctatgcgtctcttcttattgtgggaaaccaagcccttgactctgttgatgtggaggctaagaatgggactggtgcgactgttgccgagtgggctattctcgggcaagcaaacgcaagcactgcctcagcctccaaatctgcaaataagaagatgaaagtgcgtgtagcaggaaccttggtagatacggatgcctttatgcgtcggcgtcagtttttattctaaatttagatgattgacttgccttagagttaccactctcttgtaaatacaatacagtcttcatttgatttaattctctaccaatacacttatcgagtggaaactcacgaatgaagtgtgctccaagtaatgttcgagttgtaaattgtgacaattgaacagaatcgcacctatttaaattgatatatccatacatacagtcataaccaacatcccctactcatcaagcgcgaaccgatccaagaacttgaaggtccgaagtccctcctttatatctttgacaaaggcactcccagcattgctagcagtgtacacaccatcgcggtccgtagaaatgagtgcagagcgtagcgcagccgagcccttaccgagcgcaccaaccgtcttcccgaaccggaaagcatcgagcagaatatccaaaggccgaccagcgggatacaaagacgacgcaccagaagccttattcggcacgctagtaatcgacttggaggcaaacaggccctccgcaccatccgcgacaacaacagcatcgaactgcactgcgtccgacgcagaatacgtctgattaacaccatccgcaaacctctccgcaacaaccacgacatcaacgcccacagcagaaagcgcagactgcagcttcgcgccctgcgcaatagacgccggcttatcgacagacgcaaggagtccaactttcagcccatctagtttggcgagtttctgtccgaaggcgccgatatgcgcggtcgtgttgtcgtggtaaaaggttggatctggcttcggcgcatcaatgccaatggcctttgcgacgcgcgtcgcgaggtcgttgctgatgcggtttagctggatgatgacgttgttgcgcacgacgctgctcttgacgttggatgtctcgaatcggatcgcgtctacaatgaattgcttctcggcgggtacgagcgagttccagaataggcgtggctgggaccagacgtcttcaaaggtagagctgacggtgcgttggagcttgccgcttgatgtgcggtcgggtgcggtgaagaagccgttgcctacggtttgattggcttgttttggggagccgttgttttctgtgttgggggagtaggcgtttgggtttagggggatgaacatttggcctggggtttgttagaaagagggattggaggatggggtgggtttggtggtgggacgtacctgctccgtcgcggttgttgttgtggattggtacacggggccggttgatgggcagctgctcgaagttggggccgccgtgacggttgagttgggtgtctaggtaggagaagatacggccttggaggagggggtcctcggtgaaatcgacgccgcggacgatatggcccggttggaactaagaaattagtattgtaagtggtgatggtgggttgggacgtaccatgacttgctcagtttcagcaaagtagttcagggggtttcggttcagttgcatcttgcctagcttggtgacaggaacgagttcctctgggacaatcttggtaggatccaaaagatcaaacccaaaccgaagctggtcgtcttcctccatgatttgaacaccaagctagcaaaaaattagcaagaattgcgatggatatggggttatcacctacctcccactcggggaaacgtccagcttcgatagcttcgaagagatcctgacgcataaagtccgcatttttaccagcggtctgctgtgcttcctcccacacgaaactagccttgccctgtagtcccttccagtggaacttgacaagcttagtctttccatcgtcagtcactagacggaaggtgtgcacaccgaaaccatcaacatgacggaaagaccgaggaataccgtggccagccattgcccaaagaagggtgtgaagtgcactaggctgctgactgaagaagtcccaagccgagtcgtgcgcggtagcagcctgagggatctcgctatcgccacggggcttgacggcgtgaatgagatcggggaacaagatagcatcctggatgaagaaaacggggatgttatttccaacaatatctagatccaaatcagttgtgtactttcgtcaaaaaaagatctgccgtaccgaagttcccttcatcagtatagaagcgagtcgcaaagccgtggacatctcgcgcagtatcggcgcttccgcgactgccagcaacagtagagaagcgcgtgaacatcggggtttgtttgcctttggcagaaaggaaagacgcggctgtcaggttggaccagtcgccgtacgaggtgaatgttccgtgggcgccggcgcctcgagcatgaacggcgcgttccggtaccttgaaaaacagatatgagcgttggaacttcgattaaaaacgtggaacacatacccgttcatggtcgaagcgttggatcttctggcggaaaatgaaatcctcaagcagggtggctccacgctctcctgcgctgagactgttttggtcctcgatcgggccgccaacatcggaggtcagaaagacatcttggtccttgaggtagaattgggagagaaattcctcggtggaagaagcatctccatcacctcgtctctcgagggggccagcttcgccagtcatataaggacaggcagcattggcaatgccaacaagacccgtaacgagggcaagcacacgcattgcggcaggtaagtaatataactgttaatagaaggccagtctcaatagagttgtcaacaattcaaacttcaggtgaaaggtgaaagactcggggctcgctttatactccgggttgaatgtgaaccccaaacaaaacagcccagtgcgacttttgcaatgggccaatgggaagctccatgaaaatgctatgacgcagatttcaggtactattattgatcagacctgggctggccaattctccaaccaggaacccgttgattattccagcgcaacggccggccgagactaacagtgtgatgagatcgaatcacctgttggatatagtggggcacggctagaggtgttgaccgtctccacgagccaaggagaagatgagagacactatgcatgcattgctccgaatggtagctccaatggaaatgctggggtgttgatccatatgcgggccataggaatcagcatcaggttatcatggcgccactagaaggaaatggcaaaatggcaaaagatttaagctgactattgaaaatctcggcgactctttgaatcggaatagccggataagcgtcaagtcaaccgttgcatacaacatagcgaagggggtgaaggggtgaagtcttggcggttgattaagcgtaggggcacgttggtcgaggccgcgatgcttggtaattggcgagtgacatctgggcatccttgcaagaccacttagcgtccgtttaaatttgaaaacgagacggattatgtaggggatctgcaccctagcgtcaggaaattatgtctcatgttggatttatctcccaattgcaacgctgatatctaggtaaacaaacactcgcattgcaacatcgccattgcagtctagcactcgaaattgggacctgaaaatctacagggattaagctgcagtgctcattaccaagaccagctcctgcagctgatccctgtcaacgcacatctcttaccacttttagaactcatccgcaacgcagttgggatcgtctgtgatgacccgtttgtgttagtgatgttgcatcggcctccgcggaggcacaacatggggaatagttaattttagatcttcggggtcttgttctgcatcaaatgacatgcccatgtgctgttcgtggctgcttattgttgggttcgcgtggtgtgagatgcttggcggggaaagaaataatctagccagccttggaaggtgatgacactggtccttgacgatcttggcaactgtgaacttggcataattagttgtcgctaaagggctatttttaatgtgatatgtgtgtgatagagctttcggccggggagtacggggtatttttgtgagaggggttgagatgtctttttttggattgagaactgtctttggatctagtagaataatacggatatgctatagttagatagaactgttgaatggacagaatcaggtatagtctagacacaaaagaagacaaagatttatgatcgaatgactacggagtattctttctataattcaaacagccacatctccaccacgaagtacggagtatcccgtctatcataccaccaagtactccgtatagtagtatactcagccgatgacacaacaaatctatcctcgagccatcgcaaccacctcaccgggactagcggggtcactgcgatccacaaacccatgtttcgcatacagcggaacaccagccttactagcatcgatgtacgccgccacgccttcccgatccgcaatctcacagccccatagaaccagcatagcgccagccccgcgacgacggtagtcgggatgcgtaccgagcatatcaaggtctatgttttactagcgtcaacaaacagtcccccagcagaacaaaacaagcggctaagtagctagctctcgagtgatccaactcacagtaatgcttccgatcacccatcacccgcctgcgctcgctctccagccctccaaagaaagtatcgcaaacctgcccaggcatgtccccgtgccaaggcgggaaccgatccccgcgctcgtcgggcatggccaggtcccatttcgcatatgcgactatccgcgccttcccttgcgtgtcagtggtgctggggtcgatgatcttgatgtatttttggaacggctttgtgagcatgtcggtgcggttggcttcagtgaaccattcgcgtgtccctggtgtgtcggggaatagacggcgcatgcccgggtcgttgaacgcggtgaaccataggtctgtaatggccgggaggtcttcgactgtcgcgggttctaggactagagggtttggggtagacattttgggctttttgtttgcgagttggttgttgggacttgtcgcggggtagttttaggtcgactgcaggctagcggtcaatgctacgttgatttggaatagtcgggctagtattagttgattattatttgaagtctgagtcagacatatattaaagagatacataactagactagaacggaatccttgctcattggtctcttttatgtatatgcaggtctaatttttgagtacatcaaataaaagaggcagcccagggtcacccaggtatagttggttccaatggcataaaagagttcccttctcatgtagaaagacgaggtagttggaaagactctccgtgctctctcatatatcgcagtttcgtttcgaatcagtttggcgggagtcgtgcgaccgaccaacacgacttagatttgaaagatgagacgttgagcagataggattattcaaggaccattcgggcatgtttcataaactgatatccacttcccaaatggcgtttttcgtcaacgggtggcttgggattggatttccgggagacgaaggggatatagtaaattttgatttcagtttcatgggtttatctacaattcatatttacattgaatgaataataacaagaagattgagggatagacgtaagaatcgcccagcctaggttcaaacagaccgtctatagagggtgcccttaagccaaagtctcaagtgagcggtaaaagatatgcgccgacactatatcgaatgttagcaattgcatctccacgagttataaagtgcacatacgaaatagcggcaaagcaggcacacaagatagcaccctccaaataattagtctttcccttgagcacgatgaaatcgaccagaataacagccccgatcagagtgaccatctcgaacttgtcaaaatgcaaggtcatgggcttgtcgagagcccagccaataagcaccatagccggcgaaaccaagagaccgatttgaatggccgatcccagagcaacactgatggcaaggtccatttggtttttcgaggccacaacaacggcagtaacattttcggcaacatttccggcgataggaataatgatcaaaccgacgaatgattcaccgaggacgccctgttcgttgagcgttgagaagcttgaggagaagtattcggcgcatatggcgatgagaacggttgatagggcgaggagggtgacggatatcgttcggttggacttgatcacgtagcggtcgcagcgacatggtccatagtctcggataggtgccgtttgtctggggaggctccttccttcagatgccgtgtgtcggtggagggtcgttcttccttcagatggttcgttgtggaacagtggcatggccgctgccgtttgtgcgtcgactgagcatgaccgtgatcgcacctcttgcatctctagctggcggatatgtctgcttgttgcgctttcgaccgtggtgggacgcgattcgaggtcgtctgtatatagaggatcgattggatgcggcatttggagccgcgtggagtggaacaagtgagcgtgtgatttgaactggaagaaaaggtataagaaatatgtgaggagaagaatgatggacactcccctgctgaaggataatgacatatgatcagcagaagtgacgctcttgacgctgccatagaaagcggtctatgttcaggattagtattggaagcaatggggatacttggaacatcgccttacgggaatcataaggcaagagatggtgagattgagaagtcccacaaatgactgggtgagatcggtgttatacgtcacatcacttgtcgaaatacagcctgctataattgcagatccgaggacgagcagaaggttcacaaggatggagccgaggagtgatgattgaactactttaatgttgtttttcaacaaagcagtgctataaagattagttttggctccgccgacttatcatatgaaacttacacactatatgatagtcagtatatatagtttgaaaataagtgagttccacattgagactcacaaaataataagctccgctagattccctatcgtgatgttgaggagagcgccagcggtctcacccaaatccttggatatcctctcggtggcttctgtgagtgtgatcgacagcggcacaatcgcaaggaggttccatatgaatatcacaagcgccgggcttttggtattagagagaatgattgccgatgcggcgaaggcaccggagaagacgatcctcggcctgagaatctgttttgtctgttgtttgaatatggagaaggaattgcagggtctgccatgatggggccacccagacaacgtgtcgtcattggggatctgtgttttgtgtcgaagaaagctttttactttatggaagatgtcgtcggagattgaattcgtggaggcctcggctggtccttgataacgataagaagtccatgtcagcttggacgacgccggcaattggaggatagtgcggactcactgttcatttcatattgacaaggataggagccactagaccggggctcagattcgaaggaagtattcagggcgtgctcgtcacttgagctttcagcgaaggtattgatgtcatgaaggttcttatcgttggaaccattcactgtggtcatcatggaagagccccgaaaaagaaaggattaaaaccgatatataaatgccaaaatggagggcggaatggccatctgaatgtgaaaacgagagattgaaaatgagcgtgatatatggattggtccgggaattgattatcggcgagatgatcgcggcacaacccctttttccttgtggcacactggtcttaaccacttgcgagttagcgtcgcttggctccaatataattcgttctgattcctccttatgcagcgcacagtggattgtgtggggggttgtataccgcctacctaccgcctaccatagatgcactgcagaatacagaagaatggtctatctcatgattattggccagtgaaaggtatgtatagaaaggttgataaatcataccgtccgaatccgtcccctttccaatattgaccacgaattgatagcagacatgctattttaagaccggcagtaccggcagaatccacgagtgtcagacccctgcgagaagccccactggacgatgatcagtcacgtgagagggggctaaaggtgccaggccaaccaaaaaggggaagacaaagctgttatggcgacagaaagtgtgtggagaaaataaggctgggagatacttggtgatcggtttctagtgggcgtgggatgcaataatccccgcagagattgacgtagcgcgctgataaccttccaaggtgggaatagtagacccatacgaggcgttacgattacgagtggaaaaggggctcagccttccaaggctgtccttgggtcatgtatgatgatatataactggtcatcggaaacaccgtcaagagggatggtccgtttggttccgcatatcttcttaacatgggtgcttttcccaaagccagcagcagcagaagagataataattttgccaagcaattaaaacactgcccgcgtgttggtgggcttggcatttaatcaggattttgttgatatatcatttttcacttagggctcaagggacctactaactatggtatagtgtatctactgaccatgagaatgcaattggtacatatccatggatgtgttctaatcaatctttgatttgttcctgaacacccaccaaggctctcctttcaacgattaatctttagcgagggaaacatcgatgtatcatgttgcaagtttagctatctaggctaagcacggtaacaaagcgaacactcaattcattccagcgaagatataagcgtggaagatatcagcactgtacgcggtcatgggatgtatcgaaacatcaaaatcaggttggaataacctccgatctgtatcctgcaattcgaatgcgcgttcgcgatggcagcaagcacactcaacagtacaatgcccccatcctttcatccgatcggaatctgggggacgttcgcagcatttgcattgtctgccactgcaaccgcctcgtttagcacaatcctgacgtagccatttacttcgcagatgccacccggctttttctcgtgaagatagatatgcatctttggcgaatcctggtctgcctccagactcggcgacatacatatttctttcaaggcgccaatattctttgtctagacggaccagttcgtcggtcaacttgtgtagctgcttttagtcatctgccattgatttaacctgaactttttggatatcttccttcaagaatgactcgcgctgggtagttgcgcatagctgcatttccgtttcgatggcagattgcgcccaaccatacgctttatcgacgtgccaattcaagttgtgacaccgtcgacgaatcttttgagaaagtctccacacaccagatctccctattggcttttccacatggaaagccaacttctgagcttgctcgggggacatcatcgtgccttatcatattttcgagaagaccaataagacctacagcagttattaggtaggtcagacatttacatcatgcatcatcatagacctcgataccaagcccatcttaggaactaatctggggagaaccctgaatttaagtgcagtcgggaaacctacctgatctagtccgtattgtcttttatatcgccgtaactggtgattcggtcaattttgcgcctggcccatgctccatcggattcgcatccacttaacatgtggacttttaagtggatccccgttttatatttgagaatcgaatgctctcgctcgtggggtagattccgaccggtaaacccagtcgctcaacgcggtcccactaggtctcgctatgtttggaggggcgattcatttgccaatgtagaaagccttagcggagcaaagttatagtcaactggtgggtgaagaaagaagaaagagaaatatagaattggatttacttcaagtaggcacgccagtgcaccatatccgattgtctactagggtatagctatagacacaagaatgtagtcggtcacttaggctcgtctttgtagtcttttagtatttttatcttttcagacgtctctttagatatcttctctattttgattccctggactcactgttcgcaggcgcttatctatatatggctcttttcgttgcctttgtctaatacttgggagatacttacgctgcgagttcccgcatctgtccaaccaaatcgaccacagtctccttaaagggccgatatttcacccccaactcccgagctgcagtctccgcatcaaacccataagaggcactcgacttctcacccgtcttgtaattcgtagtcacaacatccttcgcccactcgaactcatcgcgaatgatatccgcagcatattcatacgagaacgtctccggcgaagcagccacaaaccgcttcccaccagcttcgggcgtaagcaaagcctgaacatgcacctcagcgagatcgcgaacatcaatccaaccgggccgcgtttcaggaagtggatctgcaccagcggccacactccagagcaccatatttgattcgttgagctgctgcaccgtcgacacggggtgcacgactggaccgaaaaccatgggaggacagagcgtcaccaggtcgaactttgttttttggtccttgacaaactcccacgctgcgagctcggcgaacttcttcgacccacggtatgcagttacagcagtggatttcggatcgatggcctcctcgtaagtcagagggttccagttcacggctgtatatgtgaatcctggtgcgggagtgctgctcgggttgatcactgcggagacggaggatgtcaagacaaggcgctggacttttgatcctggcttggcggaggccgaaagaatcgacttgactccgttgatagcgggtaggattaattcctgctcgttgttggtggtgtcgtagaataagggctgtggaacttattagttctttgtattgatcagaagcagaattattgcgagttgcctacgcttgctacatggatgaccgcgtcgatatcatccattacagaatcgaagaccccaacctgggtgaagtcttccacgacgacgaaatcaagctttgaagcgtactgcggacgtgcagctttcatctgatcccccttttgcttggatcttgtcgagcctcggactgagaatccgcgagccagtagattgtcgacaacatgggcgccgatgaaccctgtggcgccagtgacgaggatgtatctgtgatcatgagcactgatcagtagttaggaacagaccgacatacgagggcttttgagaagacattcttataggatgtaggtgtagttaaaggtaaaatgaatatcgacaagtgtcttctgggaatgactttactgtagtatgcagtgcaccccgcgtggggggaaataagatctcaagatcgatatccacagcaattccacattgctgttagtgtgggggggaaccagataaggctggaaatatagtctaggctgaacagagaagcgtattttgttgttctaattcgttggttatatggtctagatatgcgtctataggggacatcatctatatctactacatcatcacttccaactctccttcagcacctcctccgttgtacggacgataatatcataggcattacggacatacctctgttcagccagagcgtttccactaatcacccgtataacacagacgccatcaacgactgtagaggtgatgaagattttaccttccgcgttgaccaactcggagactttcttggtcagattgtcagcaacttcatctttggccacgcgaccaggcgattcactagccccgctaggattcttgacacggaagacagtcaagccaaaggctggcttcgtgacaatctcaaatatatcagaccgaccgcgcacccagccagcaaaaaggtcaccaaacccgatggtcttgcggatgtgcgatttcatgccgttgagaccatagctccgaatcacgaaccaaatcttcaatgcgcggaatctgcgaccgagagaaatagaccagttccggtagtcaattacggttcccatatccgagtacgggttgcgcagatatgctggtgtgacatccaaggcgttcgtcagatccaagcgattccggacaaagaggacgctaggaatgttagaccaaaagtgcaaatttacccacagacacttggaggaaaagcttacctagcatcaaagttgactagcagccacttgtgcatgttcgtgttgaagctgtcaacaccctccgcaaagtccttcgcaatgtacttccactcatccgcaacgagcgccgcaccggcataggcggcatcaatatgcacccagatacgctgccacgccggcttttcttgtagaactgccttgatctctgcaaagtggtccacactgcaggtatttgttgtgccaagggtcatagtgaggtggtacgggacaagtccgtccttatcacacttctcaagaagctcacggagacgaggtccagtcatttccatgttatcctccagccgcgtggacacgctgcggaagcgagtgcccgcaatcaaagcacccttagcagcgctgctgtgggtttgatcactggcaatggcgaccagcttagcttggacatcgaatttacggtcctcgtactctggtgtaccctccttcaggccctctgcaagaacaagctctcgcacacgtctctcccgtgcggcaacaataatagtcgcaatagcatcactcgcactgttttggatcacaccgccgccgtgggtctccgatgtacttctaaaacactggggtagtgccagagctttcgcgacccaatccatgacaattgtctccatctccgtacatgctggcgagcacaaccagttgaacgcaggggcggtgaatgtggcggagtacatctcacccagaatgctggggtatgtcacgcaggcggggaagtatgccatgaaattgggagactgccaatgggtcaatccgggtttgatctttgtatcaacatctttctggatttgtgcccagtcctctggctcgtccggagggttctctgggatcagagggcgaagatatcccggctcgacggcgggcaggactcggagctcaggtacgctgtcgaagtatttgatgactgcacaaaagctcggttagatttaacattatcgagcccgaaggttgcacaaagttaggacggctcgtactatcatcaatggcagagtgtgctgcggccttgaactgatcatgatccatgctgcacgtcaactagatctgcgacgcggggtatctagagctcaaaatgcggcaattggcggcacagtagaacacagtacggggagaaagatatagaatgaaagtacaagtagaatatgtgatattgaggccacagcgaatgttccaaggcaaatgtgggaaaagcaaacatggaagaaaaggcgcggggaggcctggaattaattccgtcggaagtttccttccgtgttccgagagctcggaatattccgcctttccaaggagtatatatgccataattccaaatccactctcatagctcaatcttcctcttccttgggatcataaatgtcgcccgcaggtgtcttctctagcctctttccatcctcagtcacaatctccttgctagggataaccaccacaaaaacccgagcaacatccttgcctcgatttacccattcgtggtttgcaccgcggcagacaatgacatcgtgttgatttaggatcttctcttcgcctccgtctgtgataaatccgacggtacctgacagcaccacagcgtaatccaagctcagtgtccgatggaaccagcctgcgtctgccgggggtagatcaaggacgcgacaggaaggacccttggtgtcagccagtgggacgagggttttatgcggatcagagagctcgcgcatattgtccactggaaagccgcgcgaccggtgaatttggataaccccgaacccagagtcaggccccggggttgagaatgccggagcagatgtgggatcgtatggcgtcagaatttcgtcggaagcgaaataggcctttccctgagcatcgtggcctgcgataacgcgacggattggggcgtccatggtaagagaaagaaatctctgggatgagtaatgggcaagagggattgggatagtctttgaagcgggaggcgaatatggcagttgaaaaagaaagcaagtgtcagtgggcttatataccttatggactgagtaaatagctgattaattaatggaatacagatgaacattaccaagcacttccacgatgttgatcgtcattcataggtttggtatgcgctgcttcgatttataatcatgggattgataagatgggggccgaaaatatatgaggctgcaaggagagagcctccagttcgactgctggcagaagaatctgaatctaggtagcgtgcatagtgtttcgagaaaaaaaaattcgctgttgtttacctgggctcatgtggagtttccctgatcgccttcctcgtcgtccggtttgtcaaatccttcatcatatacctcctctttcagctccttcccttggacactcaacttctccattggtagatacacaaataacatgcgacaccatttggtatcactccggtttcggaatgaatgtgcagtacccctttggatgctcacatcgccacgatgcaaatgtcgactcgaacctgagtccagtatgagatcaacatccccctcaattatcacaccatagtcgacgctcactgtccgatgcatcggcgttgcctttcccggacggaggtcaatcagacggaaaacagttccgttatcgactgtgactccaggaggttgatgtaagaactcgtcgtacatggcgatgtccgcctcagcgtcaaccgaggctggcatgctggtagtagcgtacagcaaagcaatctcgccatcttccccagttggtgtcgacgggaggtagtcggggacttgcgcatgggaaagaaatattgattcgccgtcgttactgtgggtggtgatgtagcggcggatatagggaagcgggtttttctcgtaaggggacataatgagctgatagagatggtatctgaggaagaaaaaagtgatatcaggtcagcgactcatcaaaagtcgcgagccttaagttggaaatatacccttgacgaaatgctgtcacatcatggtggcatcattttataaatcaatgcccaagtaggcttaagcataattctgttccaaggttgagcaaaaatcaatctaaagtctgcttattccctcgagcactttcttgacaattattcttaattcactatcttattaatataggagattgatgttatattgccccccccccnnnnnnnnnnnnnnnnnnnnnnnnnnnnnnnnnnnnnnnnnnnnnnnnnnnnnnnnnnnnnnnnnnnnnnnnnnnnnnnnnnnnnnnnnnnnnnnnnnnnnnnnnnnnnnnnnnnnnnnnnnnnnnnnnnnnnnnnnnnnnnnnnnnnnnnnnnnnnnnnnnnnnnnnnnnnnnnnnnnnnnnnnnnnnnnnnnnnnnnnnnnnnnnnnnnnnnnnnnnnnnnnnnnnnnnnnnnnnnnnnnnnnnnnnnnnnnnnnnnnnnnnnnnnnnnnnnnnnnnnnnnnnnnnnnnnnnnnnnnnnnnnnnnnnnnnnnnnnnnnnnnnnnnnnnnnnnnccccccccacctgcctgattatgccttattctgcttgattcctttcgcaatctcctagttatatataagacaatgctttcatttaaccccatcttcggtaaaggtcgcaaaggtctgctagttctgtatacatgaggagtctcatttatagcacgcgaccatgcatcaataattaaatgtaagaaagcctggatctgaaggttatattctgttaaaacatgccctgtagtaaaagatatgatcatttccactaagcaccgaattatgccttgttgacaagcacacgtaacatcttcattaagcagatttatcgttatcgtcatcatcatcatccttctcattcaaactccaccgtaaaaggatcggtcgattcttcagcaaagcacaaataatattcacgttgctcttccgagttctcttcccatgggatgaggagcttcctaaggcctgcgtgcactagcttttgaaaatcttcggggtccatatacgtccttatcaaaatcacttgatagtagctgaccggcaggagctcggcgcaggcgtcagaaatttgctggccagcctcctcaagcttttcagcccagaagattgcgtcctcaagatcagattgtcgcttgctggtcccgttttcgtcttcctgccgaagatatgaacacctcactttggctgctagcgcataatccggctttaggaaacggatgccctggatggattcaaaggcctcggcttgcttaacctcgtcatatgagaacgtttcgacaacggtggtcagaatatcaattggaaccgattcatgatgtaactttccctccaccaacttgaagccgccgaaatttttgagatcgtgtaggattgctggatcgcggatcagaatgtcgacatcttgtgtgactcggtcgtggccttgcatgttggcggcagcgccgcctacgagaataaagcttgtgggaatgacatcacgcaaagcgttgacgcacgcagtaatattcgctgagtcggtggccatagcaactgaatattgattagcagaggttcaagtagagaaatcacgctccacagggccaaacctgatatggcgaagaaacggtgttgcgataagaggacagaagaggatgttacgcgccgggtctttatgaaaaagagtgcattctaagtagagtattgaaaatgaggggggaaggaaaggaaaggaataggaatcaggactattgtgggcttttgtacctttgcaaaccagggaaatctcgtatgctcacttacggtttaggaaggaatgacttccaccaagaaggaaggaaccaacgagcctagatcgtaacagagggaagaagaagaggacagaagaagagggcagaagaagaagagggagaagaagaagagggagaagaggaaatgcggggtgaatacgagtgacctcgacggcctaaggcctccagataatcgttgcagagcaaagcgactgattccaacttctaatgctacgcaaagcccctctcttactggcttattctccccctgcctgtaatctcaatactgcttttacaattgggcatattccctgccatatggtagtatgtagtaaggcagtaggtacctttaatttgtatgcaaactactaataaaattaagtcccttttatcatatcaatattattaactgcttcatcaactgctttatcgttaactactttagcgactacttaagcaactgcttgaacaaccgctagcacaaccacttgagaaactgcttgagaaactgctttattagttagttagttagttagtacggtgtagttaactaacttctttaactacaacatagtaactattgcagtggggtttccagggcaggatgactaagcggctatgtgacataaaagcactcccgaggcataactagatagcaacgcagacacctttccacttccattctcagtagtcaccccatggtattctcctctctagcaccctaccactcccagtgatgactctgctctcacacctcttccgcaggcagggctgtcggtgcccctatcctagggatccctcttcactatgtagcacggaataaagtatcgtctagccagattaggcctagtctatatttattctgccggtcggattattctgccaaagttagccgatgggatttcaccgcattaattccataggataaaacaacagtcacgtgatatgcacacgaggttacgatttaactgcttcgcttcgctccgatatatgccacataaaatattcaacgccaaagtaggtgattgcataaggaggaactggcaacccgtggactaagcccaaccctattccaggattggagtcggcaatcacgtcatccgacatgtaacggtcacatgaccgaagtgcacctgtagattagttgagatactctcagtccatcggttagcatcaatccaactgtatttgctgcatccttcctgcctcctccgctggcaaaccccaacgagctcaaaagctctccacaatccggtttccaatatattccgcacccgatatgacaaatggctgattacgtcgccgatcgacctcttcaagaaacctcctcatggcccctttatcacgtatcggaatctctcgaggagcacggaatcagacactgtatcaccggcgatgctattattgggattctcggctatcccttagtcatttgcgaattttatcttgcggttgcagacgagcaacttgaagatgcccgctctgtcgttcttcagcaaggattccaagcatccccagtccgcgatatatatgtggataaggatgctagggtttcccctctaggctggccaggatacagactagtgatgccttgcgcatccgtcttcccgggggttatgcttgttcccgcgagcttctggcatatggatctctcagaatcgagtctatcgacgaacacattcctacatgattctacacgatgccgatttccaaagcggctattttatttggatggtaagcatcatagcatgattgcctctttcaactttgtcttggcttcagtctttgtttgtcctgttcgtgtactgatcttctcttaaattcctagctctgatcgatgttattgtcgaaaacgcattgaacccgggcagcaaccaacgcatatcgaggtattttaaaatgcagtatcactatctagtcggctgcatccctccggatattcttctcagtctgccgccggaggacaaattctttgtggacttatatggtaaaccgcttccaccaaaaacccggaaaagagtctccttaaatcggcagcggattcgacagggtctgatgaatgttgaagaagcatggaagtcaatccccaaaaaagctctacggtttgaagagatagagataaaccgtaaagctctgaattcgcggtaatttatgtctcatttcctaatttagggaatttcaatttagcctatatttaattggctgttgttaattcctcttagattaagagaataactagagatgtgggcttctttctatatagcctgattgtccctttgccctttcttagtcttttattgccttatgaatatagcatatctcttaagattgctagcaccgaatcgcccaacatgccttctagtgtcaagggtggtaactaggagcccggtgcgccacagacaccgcgccctactcaggatgacctcacaatcgccagcaggatattaccccagatgacgggacccagtaagtactccttccagatacatttagttcaatgactaatgataacccaagctgcccgccagaggaacccggccaacacaatgttggagccccctgaaaatccctgttgagcaggccgacggtgcagatcttggtcactaatatacgggcaattatagatctacctctcccagcaagtgtattacttgtaaaaatagctaggctgcaagtcagcaatatgaggtgtttatccactgaccatttgctgctagtaacgtggggcggatggaactcagctctcttataagtgaaggttcgtgtactcaatagtatattctttgttctcaccacactttctagacaaaccagtacgcactatgaatccgagcccctaaaagcatttcagaaagcaagaaatctcaaactctgttcaaatcgtgtatgggatcgaccgcgccgagtacggacacggtgccgcgttctatgagcccttcgctattttctacccaaatttgtcgttcaaatgttttgctgcccatccgacaccatctcgcccttcatgctactggcaaatttctcaatgcactcatcaagactaggaccacccccaaaactgtcagagtccctcttagcagcaactgcttccttccagagaccgttcatcctctccccacccaagtgcatcagctaattgacgaacaccgtcgtcgcaactcccgaggatgcacacatcctcgtttcgatcacctagatctcctgctttttcattgttgatcaaaacccgaggaaccccctcttccactttcgttggcagagtagagcaaggtggtacacgtaaactagttcccataacaagcatcaagtccgcctcgcggacctttctctcctcctcctcaaacccagtcaaatattgcccaaagaatacaatatctggctgaaccggaccgttacacctataacaacggggtatttcaccagcgagaatcgctttgtccacgagatcgtcgaaatatggtggcttcttgcacctaatgcaatgttgactcttccagtttccatgagcccagtaaatcttgtgaggaacccctgcatcttcctcaagctcatcgaaattctgagtgataacaagatgaagcagattctttctcgctagcagtgccaggaacacatggctgacagtcggtttgaaatttcccgggtgaagtgcccgggccaatgtgtagaatagctgaggctttgcccagagataccgagcatcaaatatcgcctctttgcaagggagttgcagtggagcgagcttatcataaaggcctgtgtttggagttctgaaatctgggatccctcnnnnnnnnnnnnnnnnnnnnnnnnnnnnnnnnnnnnnnnnnnnnnnnnnnnnnnnnnnnnnnnnnnnnnnnnnnnnnnnnnnnnnnnnnnnnnnnnnnnnnnnnnnnnnnnnnnnnnnnnnnnnnnnnnnnnnnnnnnnnnnnnnnnnnnnnnnnnnnnnnnnnnnnnnnnnnnnnnnnnnnnnnnnnnnnnnnnnnnnnnnnnnnnnnnnnnnnnnnnnnnnnnnnnnnnnnnnnnnnnnnnnnnnnnnnnnnnnnnnnnnnnnnnnnnnnnnnnnnnnnnnnnnnnnnnnnnnnnnnnnnnnnnnnnnnnnnnnnnnnnnnnnnnnnnnnnnnnnnnnnnnnnnnnnnnnnnnnnnnnnnnnnnnnnnnnnnnnnnnnnnnnnnnnnnnnnnnnnnnnnnnnnnnnnnnnnnnnnnnnnnnnnnnnnnnnnnnnnnnnnnnnnnnnnnnnnnnnnnnnnnnnnnnnnnnnnnnnnnnnnnnnnnnnnnnnnnnnnnnnnnnnnnnnnnnnnnnnnnnnnnnnnnnnnnnnnnnnnnnnnnnnnnnnnnnnnnnnnnnnnnnnnnnnnnnnnnnnnnnnnnnnnnnnnnnnnnnnnnnnnnnnnnnnnnnnnnnnnnnnnnnnnnnnnnnnnnnnnntctgggaccccggcgctggtactgataccagcgccaaccaagacgacaatctgtgtggcttttccagtctggataaggtcgacgattgattgaatgtcaggtttcatactggcctctgtatgatgggtggtttcgtcagacatatcttcgagtttggctatttttgtggatgatggttggaagtaaatgagtgttttggttttggagcgtcaaagaagcatcaaagcagatggctttggatggaaaagaaagctatgggttttattgtgttagctggctaggagagagagaagaaggaagatcaaagaaggtagaaatagggagcaggtgctaccaatctagggcagaaacggtctgggcaggtttctatctgcagtaggcttctgtaaatcatacatgtcatgtgttcattatccaatcagcctgatggaagagattatctcttattattcactaggcaaagtaacatttgtcaactcagtgagcaagtctgtccagtctggtgcattgagctcaacattagcgctgctctctagcatctccgtccatatgtcttcgagaggcaacggactaagcaatgcatcttgtgaagggtacattgtcgattgaacgttgggtatttctggagggaatgtgatgctcttggaacccaatgaaacaggcgtggggatatccggctgcgaggcgttggctgttgtgagatttggattcgaagatgcagaaagctcctgtaagtcgcgagagcttactcttctttcgtgtttccaatgcctccgcaagatctccatcatggctttgattccttcacgtgccattggagagtattgttgtgcccgactgagcattcgacaagcgtcgagtacctcctcttttcgtttctctgccagaatatcatcccagttgaaacaaacatctatcagaagaatggcagctgccataaaaacgtggtgcatgactgcccatataatcgagctgtgcggtgtgaacacaggctcttcctcatccataatgcgtttcagttcgagcaccttgcgcgcagactgaagcgatacgatatgcgaataggaatatttggagtcctttgctccacgcacaaagtagtggcgatgcaagcggcagagccgcgaatgatagccctgttgtaccagcgctcgctgccatgcaagagttggtcgttcacgatagaccaccgaaaattcacgttgggatgcttgatcatagcgaaagaagccgggaatctcagcgcgtaccttgtgaagcttttgatctagctcaagtatcttctcgtagggtgcctcttgcccatggaaatggtagtatgacgtttcatccactatttgacgacacacaacagccaacttcaatcgacatagactgtatgacattgcggtcggagtagatagaggaacaccgtgttcgctatggttgatttcctcatcctcaatattgagaggctcatttacaaccatatgcttaggttggatcgagtacgtccactcttggggtccactcaaaaagcctattaaccttcagatatcatcagtcatagtaccggcaaggtctttgttaagaacgtaccagtcgtatgttgccaagtcccaccacagccgtcgtttgagttcaacattcgttttatcaaatccatttgctaagcgttcggtaataacccgaggacagtccacaatatgaagccccatactagtggcttgactcacaaatgacctatgcacaaataacgggctgacggaggagggcaagttcatgttggacagatgatggccaatgatcatagtcgcttgcagtccttcgaggctgggataagggatataattgctctggatcaatgcagcgcctgccaaaaatgtactgtcctgactgaattgttctgcgtgctcggatgactctatcaggagttggtaatacagggtagcagcagtgatactgaacagtagagcagtgtgcgccaagttgatagactcatttcgctcaacacgctcgtaaatcgtctcaatttgtcgttccacgcgactggggatgatgacatgatactggaagtcaaggtatttacaataataccgaaatagactcagcgcttctgccagtggtggcaaatacgactgcagatgaattgtcgccggattctcgcgagaggcgagtcgttcacacatcggaggcaatcgatcaccaggtgtgctgttttgctgggaaggcgagcgttcgggttcccgctgggagatctccgccctcagtgtagcagggactgcactagggatacggtgtcccataacaattgtctcaagccaatcggctgtcaaaaggggctcatttccattgcgactttgtgtctccgtgtcctgtcgtggagtccactgcaaggtccgaggtggctcagatacgcgatcgtccaacatgggcctccgatctgtttggctcatgggtcgcacaggggttgtccccgaggcgtagctgccatagctgcactccagtttacgcgaagaacagctactacagggaagctctctgtcgcacttcagcttcttctttcgacaggactcgcaggaaacggggtcttgtcgagactgtcttttcgggcctggggtgacgactccagaaacttgtcttcgtttcatgttttcaatctccccgaaaacagtttaataatagtgacccagcgaaagcaaagaaacagcgcgtttttcgcataggagacagcttgaagtgttggcccggagactccgcggattctccgagacgctaaaccatatctgtcaattcttcctccggggcatctagacagtagcccggagactccgagagtgattttcagatgtaattaaggagtcagatttcttataaaggtcatggtattccgtagtcatcttgcttttaactagagccatttcatttctgccaaaatgtcaccaaaggatagtcctccaactgaatacacgtaagtgaaatatacttcaagctacaagatatgtagccgaccagtgcactaacctcttctaggccccgagcatggctagttatattaggcgccttcacttgtaccttttgcaccgtggggtttatgaactcgttcggtatcttccaagagtactacacaaaaaaccagctatcctcaacctcgacatctaccatcgcatggatcggagctgtgtcaatattctttttgtttgctatatctgtcgtggcgggagcaatgcttgatatctttggaccaacggtaagcatactcttcctgaatcgtcgagaaataaaactcatacttcctttgaacagttcatggtatatgttggttcattcgggtgtgtttttgcaattatgatgacttcactatgccaggagttctatcaattcctcctcgctcagggtattctgttaggtgtctccatggctatggtgacatggccgatgctcgcactggtcggacaatatataaaagtgaagcgtgctgccgcgatggggattgtgcttgcgggttcatcgctcggcggagttatctggcccgttgcaatcgacagactgatcaataagcccaagattgggtttccctggaccatgcgaatcgtcggatttatcatgattccttgctttatcttctcttgtgcagtcgccaaatctccgaatacgcctgcaatcaatttggagagtcgtgattcaaaccagaaaagtgacgaagataccgcggagcaaaaggataagccgcagagtcacaaggcagaagcgatggccctttttcgaaaaccgtcgctgcagctactgtgcctcgccatgttcattacatactttggcatgttctcgccgtttttctacacgacttcctacgcggttgagaaaggattctcgacatctctggcattctatactgtttccattgtgaatggggcttcattcttcggtcgagtcctccctggcatcgttgccgacaagtacggaaaattcaactgttgcatcatagcaactatatccgcaggggttgttgcattgtgctggactaaagtcacatctgtggccggtctggtaatttggtccgctgcctatggctttgcgtctggagtgagttatcctcgaatggtataaacttcgaatgctgactagatttgtagggcattttatccctccagcaagcttgtgccgcccaggttgctacttctaccactcttggcttggcaattgggactgtgtcgggtgccacagctctatcgtatgacccccatatcttgaaatgataatgtagtatgctgactggaactgcagcgctatggcaaatgtgcccatcagtggtgctctgctcgagaagtacgggtacctttccctgtcaatattttcaggggtatccttgctactaggtggcttgcttttgattgctgcacgtctagtacagaacagagagcttcgagctatcgtgtaatgcttggccattgggttgaatttgaaaaagtgagaggtgaagctgatagaagatgggaagatcgatcaaagtccaaagacgattgatggatactgatagaagaggatttgacggaaaatcgtgcagcatattttccactagactataacaaaaaccaatgttcctgtttaaggcttaaatgagccataactatcacattctgataagatttatcgaaaaacaaaaaacaaaaaagaatggtcccagagggggtcgaaccctcgacatctgcgttattagcacagcgctctaaccaactgagctatggaaccgcttgatgtatgtagcatcaatttgtggttatataaagtgagtaggacgatagagcagggacaaggccacttatagaaagagtacctacagttcgtatgtatgtaaactcttagcagaattaagtcactccttccctatcttgtaccaactgtcacagagatatggcagaattctgagtggtaccaaattagaaaggcggtacaggcagggatgtgcaagtaacaactccctaaatatatattccgtacagataccagaagtatgttccaaaatttgcaagaagttccaatatttcaaataattatgacgctcgggacaatactatcccgaacgatgaaacggaccgacgacctgcgtcaatatactagactaggctaacatctggggtcgaatattcccgtgtatgtacgcatacatagattgtcctacctcctgtaagaaccaagagtctcgccgaggctattggataacggcgatttcgttcacttcctttgtggccaggcatcatacagtccttcaaagaccgtcacatcttcgaatgtcgcttctcccacgccgttatggaagaagttaattttagtcgagttggcgtaccaagaccttcatgcggttagtttttgaccaatcttccataaacaagagagacttaccgagcccaagtgcctagagcaaagcgtccattggcatatacttccagtacactattatccaccacgatagtgagctccaaagtttcaacctgttcttttccatttcgcaacacgtcgaagaggcgcagacgtcccgcctcgttatcactgaggatcccagcagttgttctcgccgcagcactnnnnnnnnnnnnnnnnnnnnnnnnnnnnnnnnnnnnnnnnnnnnnnnnnnnnnnnnnnnnnnnnnnnnnnnnnnnnnnnnnnnnnnnnnnnnnnnnnnnnnnnnnnnnnnnnnnnnnnnnnnnnnnnnnnnnnnnnnnnnnnnnnnnnnnnnnnnnnnnnnnnnnnnnnnnnnnnnnnnnnnnnnnnnnnnnnnnnnnnnnnnnnnnnnnnnnnnnnnnnnnnnnnnnnnnnnnnnnnnnnnnnnnnnnnnnnnnnnnnnnnnnnnnnnnnnnnnnnnnnnnnnnnnnnnnnnnnnnnnnnnnnnnnnnnnnnnnnnnnnnnnnnnnnnnnnnnnnnnnnnnnnnnnnnnnnnnnnnnnnnnnnnnnnnnnnnnnnnnnnnnnnnnnnnnnnnnnnnnnnnnnnnnnnnnnnnnnnnnnnnnnnnnnnnnnnnnnnnnnnnnnnnnnnnnnnnnnnnnnnnnnnnnnnnnnnnnnnnnnnnnnnnnnnnnnnnnnnnnnnnnnnnnnnnnnnnnnnnnnnnnnnnnnnnnnnnnnnnnnnnnnnnnnnnnnnnnnnnnnnnnnnnnnnnnnnnnnnnnnnnnnnnnnnnnnnnnnnnnnnnnnnnnnnnnnnnnnnnnnnnnnnnnnnnnnnnnnnnnnnnnnnnnnnnnnnnnnnnnnnnnnnnnnnnnnnnnnnnnnnnnnnnnnnnnnntcctccccgccgccgcttgggtggggggggggtcgacgatgatggactcgttggagaattggtagtagatagttgtagactcaagactagaggataaaacctggaaaccagcctggatgccagagtcacgggcagaggtcgggaaagatatatttgctgtcagcacgaagaacttgcttgagggtgaggtattgaagggcactgctccagcattcgacaacgttttaccagactcgacaaaagatgagccggatgtgagagcgctgtaagtctccctggaaattgagattcccattgtttcaaggtcgatctgaccagagtcttcgcgggccacgcgccacgatgtcaaggactcacgcgaaagttcgttatccaccacgttagagatagtgcggacattcagctctcgcggcagtaagagggccccggtccagttttgttgagcggtagggaatcctttcacttgctcgaatagatctccagtgagccagacataggaaatgaaccgatcgggggcaccgctctttgtggatgcctgagagctggccggcaagatcttgcctgcagcagcatatgccgacacgccccagtcaagcacacccgccatggttggcttgaaagtgacagagccgtcatttgtgacattgccggtcacccacagcatatcgcgaatagaggagacttgaggaacgatgggaagtcccgaaccctcagcaccgagggttatgaatatctcgccgtcttcactatacccctctgcattcagactaaagacgttgccaacctcaaagttgaagccccaacccccggcccagtcaccctttccccaagtggtattaaggggctccttccaccattgcccgagatattcccaatattgaaaatctgcgtcgttctgacggtagaggaactgacaaggtccgacaccgtggacaccgccagatatggcgacataccatgttccttgggtactattgacagatttgtccagaattgggctttggaaaacgtaggggtcacggaaagcggtgacattgagagcaaacggaggcgtagggatcacgggcccttggttgagcttggtgaagttgtgaccaccgtcataggaaacggccaaggattgtgtctcgcttccccgggtgtaggggatggaccagtggattgggaggtatgatacagaggtatacagaagagttggcatgccgtctataccgcttggaatgaccgagccatcgaagacagaaagagggtcgttctttcctcctgcaacaattgacggggctccatcgggattgaggtctttataggtaacgagatcgtcggttgtcgctcccgaaatcccactgtaaagccaacccacgtggaagagaccagtcttgggatcggtatagtgcccgcacgggtcgcctatgttcccagatggagggagaagatgggctctgggtctccatgtcttgaaaagagatgcgtttgccagggtagaaaggtttggcggagccgagttatagtcaatcggggtatggaaatcaacagccaatgcccggtttgctaaacccacggtgattgcatttgatagcttcatagtgtagatcttgggtagctgttgaacttccggatatacacacctttatatgtctaatcttgccatgataaattgaccgaggtgggatgaagacaggagccaatagaaataggatctccttcaatatggatcttcttgtgacgttcatttcctctttggatggagtcggcagtttccgcaagtcaacggtaaaaccgcggggaaaccccggatgacaatttccccgatgcaaaaaaacacagggtctatgattttagttctagggaatagacaaaggcaatagccatggccgggtgctcccaggtgaagtattgtcgggaatccctgtcgtacccaaattggttgacggaaggccgcttgagaatcgttcgatgcctgatgtgtgccggtctggtgaatgaccagagcttgtggattctcacttgcaatgggttcggtggttggaaaactgggaggatctacaatgcctcggcaggcgtggcgtatcaatcacgacgtaatatggagattttccccttcaacccttgcatcaagaaagaagggtccacgaggatcgccgaatgaataagagcgccccgctcactcacactaagggcttacggcaaattgtgaacatatttgcgagcctggaagagactcgaaatttcaggtagatgaaagtagagccaaagcttggacacgactcacagctaagcataacctcaagccatgaaagactggtatcattttgttgaaagatccgtatatacattcaatcataagaaaaaccaagaacctagatcttctccgaagagtacaaacgaacaggcacgccataatcatgcgacatcgtaagattagatagtttgacaggctcctgtcgaggatgggggtccgcgttttcgagggtatcgaagtgctgcatcaaacgaacgacggtatagcttgcctcagtgagagcgtattgttctgaaagattgattgttagccactcattcaaggccatcttcgattttgtttctccggggaaagagaacatgcacaacttacgaccaaggcagatacgcggcccaccattgaaaggcaggtattcccagccatgcttagcattttcttcccatcgctcgggccggaaggaggccgcatccttaccccatagatccgtccgacggtgcatagcgtagacactgtaggcaaccatcgtgcccttcttgatataaaccggggattggtggtccgtaccaccgccgaccggtagggaggtgtcttttgtcgcaatgcggaagttgagaggcacaggaggctggagacgaaggactgggttggagttagtcggatatccattgatagtacacagcatatactgcatcaactcaccttcattcaacacatatcgcagataaggaatatccttcagcttcgtctgagtcatttccgaccgtggattctttgcgtctccgaaaatgtccacgatctcatgacgcagccggttccacacattggtgtgacgggaaagatagaagaaggtcgagctcagcagactagctgtagtatcgcgaccagccaatagaatattgagcatgttatcgcgtagaattttagggtcatccgtctcagcgaccaatgcttcgaggaagatataccgaccgtcagcatttcccttttctgagttccgtttcgactctagagcgagattaacatagtgatcgacaacttcgtgcacctggcgatttgcctcgcggaattccttgggattaacaacccaataaattccctgggcgcgactccgcgcagcgagataatcctgcgcggtcccgaaggcgttggcgaaaccctgcgcgctaccgacggcgcatttttccagcacgcctgtcttcccagaaggggggagcatgcaccccacggattccccgaacaggaagtgcgttgccgagtccagggtcagcaggaaaaacaaacgctggatgtcgaaactgcttctatccttggggatcaggtcgatcaggttggagatgtggtcgtccaacatggaaagatcggcgacctgtcacctcggtcaatcacatgtgcataaattctccgacaaagttttagttacctggtccctggtgaactgcgggcgcaacaatccccgcgcatgcgaccacccggcaccatcgagggtgaagatgccatcgcctagcagtgggtagaattgttgatgtcttgttccgagagagaaatctttgaattgggtcgcgagaattgctttgacattttcaggctcgatggtggtcatgatattctgagacaggaatgtctgtctgtaggtatttccatagacagcatattcgtcacagagatattcgatccagcgcttctcacgaacagccttactcaaccgaagaaagtccggaataccgaagaaagtcgaagagcctgaacgagcaggcttgcaatgcagagctctggattgtttacggtgatgacgtatctgtacgaagtagcgcacaaccaagaaggcagaaagcacgccaaccagggcaaatgtagggaatagcatttcgttaacgtatatgaattggaagaaacagcagtcaaatatgtgaatggaaatctaactcttatgatatgtccatggcctcccacgtgaaaaaagcggagatcgcaagctgattcaaaacgggaatagtgtcgaatggggagagaccgtcgcttgaaccttccagggtttagcaattaccaagccttggcctagaagcatccgagccattctttcaacgccgtgcggaagtatcctcgggaaatcgcccctggcacaaatgtcgtgcggaaatcaaagcagtgttccgcattctgcatgatgtaaccaaagaccgtattttccgccgtctcaacattgcacttggggatttcggtcgtgagagacactccttgcggggctaaccgagtgccggccgcgaggggcgacaaagtgcgccacggatcaaactgaccgccgctccagtaaacgttggacggacgaatggtccatccgccggtttccgcgttgatagcgtcgacctgcgggtgtttagggaacagaccctttttgacagcctccgagaatgatcgttcgcagtattcctgcgcataatcgagggtctggtatctggacagcaatgagtgaggcccgaagttgtcggtctggaagaatccccattcggtgcagtactgccatgtccagctgatggtgtctgggtcggtggatggtgcgccaagatcgcatacgagcggatcgctggcttcaagcttcttgcagttggtatccaaattcatgttgaccaactgcgtgaaaggcggccatgacgcatatcgctccgcggcgtacttcttcccccggctgggagcgaatccatgcgggggcgccgctgcgctagtcttcgggtcggtctccatgtgctcgcagaatgaccccagactgcccaaaccaccttccatgccgtaagactggtaatagtagtagatgatcgtgagcgcggcggtgaaatcgccgttgctgtttttttcggcgccttcaccgaagaatttccgcttgatggccgccgcggacgatttgctcttcgatagttcctcgtcgatgtattcaagtgcagccttgatgtcgctggtgcagttagagtgtccatgtgcgaccatgccgtcatacacctggtcgaaatagacgctcatgtcgatccgcgcttccacgggggcggaggaagcgtaggaagcataaattgtatcggggtacaaatgacgggtgaacgcagctcgcatgccagagtacgagcctccaaccatgacccatggtgttgcgcttggagttaggttcacatcgctgtaattttcgcgagtgaagttggcggcaaagaatgggatgtctgcaagagcctgtttattgttgaggtactggagatgctcaggcgtcatgttccggctgacgttgtagggaagagaatccccatagtatctacttggtgttaattgagtccgagctttcactggggagaggatacaaaccggtgttcccagacaataccaattccaccgaaatccctgaccaactgatagaagaacgtggtcgaattgcccagaaaggtttgagccgaggattcggcatttccttcaccaacatcatatatgaagaccggtcctcctgcctggtaatgctcttcagatacccaatagcggttctggtaatcaccaaccgaagagttactgtgatcaatagggagctacacatcgtcagcattcatctccgtcttcaagaaattggaaagtctcacataccgaaacatattctgcctcaacaaccacatcaagctgggcatttgaaacagcatacaccgaggtcttctgactgagtaggatatccggatagacccccagctcagcggaaagctccagatcgcgcttgaatgacgatgtgacaattcctgcagctgtaccagacagcgcagccaggactgcagtcccccgaacgatagttgaaaaatgcatattgactgacagtgccttttgagtctctcaaaaactcaaggacacacggatagagaatagctttcgactatctcgggtcccttacagaatatatatgcattatggagataggctacaagcgcggaaatgacaaggcgaatcagaggacattatatgagaacaatatgataagaacaatatggttgcgtttgtcgcaaggccgcagtcatctggaaaaggtggattgcgcattcggggcacccgataggatcagcgacgagtggacaccatcaggcacacccgagacatggccatcgcgtgcggccagtagctgcgtctgtatgacccggggcgagaggtcacggagtctaatttctggggagtttgagttggatgtaacctacttagcacggcataaggtgtatgtctcgaattaattagccatttcccccaattacccctcgttttgattactatcagcacttggcaacgctgtgataactgtgcattgcattagtgatgtagtacctccctgctagctcatgttgactatcacttcccgattcggcagaatgcgatcgtcgacagattcagcgaagaactcctgagacccgtggtgtttatcgaattcgattaattaactttctagtcttagaccgagcaacaaacttccgcatctgggtttatctaaaaacaagcaccacgcgacgtccaaacccccgtcactgggggtggatcccgaaaccaggtctgaaatcggggtcgatcattggccatgggactccgaacaggtcaaccggactccgaacaatatcccgaccttagtattgttgtgtgtgattgtttaattagcatcgccgtctctctaccgattcaattcatgatattgtcttgtctcggcatcttcctagaagcacgtctggaaacggtggttgtggaatgttgatctggaatgtctgcgccagttggaaaagccaattttgcgctcgacgtagaaacaaacatagttcactgtggcttggattgacatggaaggattattccacatgcttttcttcttcacgggactccgggaccaggcccgtccctctactacggctagagtatattatacatcaatatcacatcaatcgaaaggttatacacggaaagtcttacggtttatgctttttgccgttcatagagaagacatctagaaagactacaaaaaatacatgaagtttaggcatactcttgtctatactaattaagactagcggtgagccagttcaagatctactacagtaaaatatgatatagcacactggccagactagtcataatgtgatacaaaggtctcctcggatatacgaaggaagcaagaggaggcatcatggatgttgttattgtatggtgaatcctggtgattatgcggggtagaactacgaggttatagacctacaggtactaaaatatacaagctcatctagttaataacctagttagtaacctctaatttgtaatcatgtaaaccccgatattcgaagaatatttgttccgaatcagagtctaacacatgcttctactaactctgtgtaaggtggcacaattccacccataggcaagaaaggcaaacatacatcgttactctgtaccagacttttaattgatcattcgcaggataattatttgaaatcaagctacacttagagtacactgtggcaagagaaagaaaagaatacacctgtgtgtcccaaaaaggaaagtctgacgaggcctcggcacgccttccacctttatcaagcccctcatcccatcgctttctccaggctgctcggctatggaaatcggactcggcccgatttgcgactatggcctgcagagtgtgacgatttgtaataatggagtatgtcatctttgttacatgaagagcaagtgacctccacgggcactccggcccagtttccaactctgacacctaccagcatataaagccacggcgtcccttccctcacgaaagccacttcttgaataaccaccctattgcaaaggaagtatccaatcatgccgcaatcatctcgcttgcaaggcaaagtagccctcgtcaccggatcctcatccggcctaggacgagcgattgctattcgctatgcccaagagggagcaaaagtagtctgcgctgacctgacaccaactgcccgatcccaagaggagtctaatatcacaacgcacgatctcatcgtcagggacggtggtcaggcgaaattcgtgaagacggatgtaggggatgcaaagcagatggagaacttggtccaggtcgctgtgaaagaatatggacgagtggacatgtatgaaatgataatgaaggtcttcgattatccttctgacgatttatttagtctagtcaataatgctgggatcagcattgaggcacgcacgcctgctgtgctacatctgaccgacgagacaacctgggacatgacgatgcgtgttaacactaagtctgtgtttctgggttgcaaatatgctcttagtcaaatgctggctcaagaacctcattcttctggggaccgtggctggatcatcaacatttcttcaattatgggtatgattggtgggccggagaatcgtgagtttcaactcggtctgtggatctgaatgttgctgatacttgagctagcgtcgtactgtgcatcaaagggtgctgtgagtaatctcacgagacagatggctctggattatgcctctgataacattcatattaatgctatttgtcctggctgtaagtcaattggtttgaggattagctgaatattcactgacaaagctttagacacccaaacagctatattcaaagagacaattactaacttgactccttgggaagacctaaaacggcgccatccattgaaaggacctggaacaccggaggatattgctcgtatagctgttgtgttggcaagtgatgacgcaaactggatgactggactttgtcttccagttgatggcgggtatactgctcgttaagtagtttactgttagtctattgacgcttcacgattttctagctgctctcctagtgcaattttgaagtgttcgaaacagtatattcctaagcttgatatcagaaacaaaacgacttgactacattaatgcaattgtaatgactaaaaggcatctaaaagctcacgcaacatattctgggggtgcagccaccgccgccttcggggggcgtgacactctcttaccttgaggatccgaactcgcagcttgatcagcccaattccgaataagcatagtcacctcctcatccctgctactctgggaagcagtatacccaatggagtccgtaatcttagtggaagcaccgttctcaagcagaagacgagccatctcaagattgcgagtatcagcagcgagatgaagagccctcttcccatcacctcttttcagatcaacggggacgccattatcgagaaaaacctgaacaacatcacatttccccgcctcaacagcctcatggaagaggagctccttatattcatcccgcgctttgggcgagaccctcttactgcgaagaaaaacatcgactacatcagcatgtccctcttttacagcgtagacaagcggcgtatgctggcaaaaattctgcattttaacttgcgccgtcacaccaatcatgcgaagtctccagcccggcttatgggcgtcgtcgtattgcatgagaagtttgcagacttcgtggtggccgtttcgccaagggcggaggattttgtcgagggttgaagcttagaaggagctgaactagttctgtgtttccactttcagcagcaaagtgtagcggtgtctcgcctcgtttgttgaaagaacttcctgtcgctcggtcgcattcgaggagcagtcgggctgtctctagatggccgccttttgcggcgttgtggatagggagtgcatcgttggcatctcgggcccatggtgacatgctcttttctaggaggagtcgggcgatgtcccagtggccttgttctgctgcagcatgaagaggcgaggagcctagtgagtctaccacgtggatgtctgctccgttgtcgagaagtattttgacagcttcgagatcgccgctttttgcggcttcatggagtgactcatgggtggtttcatttgtttccttctttgttggacatggctttgggatatgtaaactatgacgtggtcagtttcgaaatagtagactatcccggggtagtgcgcatcttttatatgcctgaaagaatcctcggttgtagtaagaatcccaaattttgggtgtttgctgctcattggatgtgtagcctgtccgatcttctcgtatagggaaaataactgcgccccattaatctagagcgaaagcatctggtcgctcgttaaatattacttcttcttggacaagttcatgatgatctcaattcgaggactaagaaatactcagcccataaataccccaaggcaggctctcccgcttctgtacctgctctctctctctctctctctctgtacatgtcctagtaggtacggagtaggaactaaaaggacaatgcgctaatcctaatctagttgaaagtaagttgactatataatggtaaattaatgcgcgggatccatcagtatgaagctattcagagatcaccctatcaccatggagtaattcaaatggcttctactaccactaccattgatgaagatatttcaatcctgaaaactgcattgaaatgctagatagtagagtattgaatgaattaaatgtgcctagtaacgaggttctagatctggggatatccccagggaatcacaacattcgcctcagaaaaagcaatataaactttctcccagccaccgctaagcggtctaccacggcaatacctctccattttgcttccttcctcgtgtgttaatttcttttgccttttcattgagtcatccccaaaatatcacaacgcgaattatgaactatgccctggcacgactaaattccttctctcacgctccatgaaagagagctggacccgcccggttccagtacataccccaagatggcaaggcaagcaagtggaaagcatcagcatagcggcatgctatctgatgttcggggataatgtcaaactgttactgaagtgataacaacagtaaacccgtctcgtcatccaaatggggttaaggtacggagtagtgtgggcaattgttaaatccaaccaatgaacactcaaagcacccctgtgtactaaccggatgtagttagcatattgtcagcatcacccttaactacttctttcgcggatttaagcattcggaacggactaaataaagaggtatataatcggcattgctctcccataactagtctctcttttgacctcacgtacatcaattacatcaattaccaaaatgcatcttatcctcacaggggccaccgggctggttgggtcctcagtgctcgacgccatgctcaaaaacgcagcagtgtccaagatctcaatcctgagccgaagccccgtgcgaatggcagaagacgcaaaagatccacgagtacatgtcatcacccacacagactttgaatcatacaagccagagctgctcaaccaattgaaagatgcggatggatgtgtttgggccctagggataagccagactaaggtcaccaaagagtacgagagatcccactcctacgtggatatcagaactaataatcactagacaatacgtcaagataaccaaggattataccctggcggctgccaatgcgttttccacaatcaagccatcaaatcatcccttccgattcatccatgtatctggcgaaggagccacccagactcctgggcgattctcgccgatatttgcgagagtaaagggcgagacagaagcgctgcttggaacgctgtccgagcaaaatccgacctttcgggtcgatagcgtgaggcctgcattcgttgatccggcgacgcacgatgccatcaaaccatatattccatctggtgcaacggctggagttgttgcaaatcttggagtagcgttgcttggcccgggtattcggtgctttatgaagtcgatgcattctccaacggaacagcttgggtcgttcttgacggaaatggcgatgggacgctatgaagcaaaattggagggtccgggggtattcagactgggaggaggttatgtcattgagaacattggtatgcggagaattttggggctgtgagcatctaagtatttaactgtttttttgttcttactcgttcctaatggcctaataatcaactccaccgacaattgacaccgattcgaatttggcacgcaaacttaccccctccactctagtctgaaagggaaggaaaatgagaagaagccatatgttgaattgagctaatggccaggaagtcccatcctgccttgggcagtaaggctacgtcaaccaaatttgtattccagaaagacaaacaaaaagaaatactgaggatatgacaaggtcgcataagcgggcggctatttttgtacagtgtatacacttgaaagcatatattatctaaaaatctcaatgaatatctgtcaactgcctaatcataaagaaatgaaagttagtattaaccacgatagtaaacccgggcgatcatgactcgaaggggaagccgggcaagtacaaaggatgttgacagatataaacatgacctggcgatgtctattgagccccatcttgggcaggaaggtgttgagaagcgtaacagctgccaagcggattttcgctcaccgaggggatattgttctttgttaacacagcgtaggacatatttgggatttcttatccaatcaactccacgtcctcgtggagatcggggttcacagaacgctgatctcgacctgtaaaagtgacacaatagacaatcctccccgtctgaataagaaaccttttaaagaaacatccttatgcttatttatgacgtgtcgccaatcttgccttcattacgaatataaataaagagacgaactgctgtactgaaacggccacgccacatcagcctactttacttcgatacaagatgaagtacttccaacttggtagtatcctcgccttatgcagcatggttttggccgccgcaattccagacgcctcgcctgatagtcttccatgtctaccacaagggggaggtcgcaacaacaaacctattgtgccgggcaccgagtgtggggatttctggtagggctgatctgcccatcagagcagacatgtttgtgaaaaggtacgtagatcctttcccgacagtttcatcttagaacataaacttactcgactactagccgtgcttcagagcgtgtttgacctggctcgaccctctgccttggtacttgctccgctggattgtgaattttctgttattcgtgccttccaatactcctattttggaacaatctgtttgtatgactcaatgtctcgggatctcacgttctttcttcgttgactatgtgtacgatggctgggagccatttcaatatcattctttaacggtgataattctgtgtagtacgctatccatgatcctttcgtgatatcacagtttacatatcttcttgatcgatcccatacttttcccagttcgtagaaggaaagagaaacgccaaaggccaaaaataattatatactccgtagaccgcaaagcgcgagagagggtggttgcccgagaaaggtgcttaggtaaacatgaaggcatcaacttcctcttggcagagggccactaatcatcttgaactctcaggaacctcatgacctgtacggaatagtcattttgaaacggttgagtgcatatccagtcacctccttattttttccattaggaagtattgagtgatgaatgcgccaattacctccaagataacatccacgtccccaatgctgtctcggcctttcggcgaaagtagtccgcacttcggaaagcggaatgattcttttccatcaaataaaggcgggatccatcacagcatcaagatgtttcaagtacatatcggattcctccactactgcagacgctccgtgggattgaaacaatcgtcaccccacacggagttacagggggtcttggcaaggagctgcatgcaccctggccttgtgcttatttttaacaaccggccttagtctcgagtctgcagattgtccgttcctagaatggcaattatccagctgccaaggagccagaaacgtcgcgcattggtggaactatgggcaaattcatgcaggaacggagcttcagttcgctgccgaatctccaccttccaacatggagcgtttcaacatgaagaaacaaaagtgctctcctactataatatgctgcttgtctgcccttgatagtttcttgtgggacacgagaaggctctctacaatacacgttggacatgatgtttttcaagtccttggccattgcttcgctagcactttgggctaagcaggcatccgcggccttcggaatcactactagcactgcttcctatgtgattgatgctggctctacaaacccgcttaaatttaccgtcagccggacaaactgtgacattacttcgatcaattactatggatccgagcttcaataccagtcgactggatctcatatcggatcgggtcttggtagcgcaactgtgtctgccacgcagagtggtgagttgagaaacaagacgtctgttggaaaatattctgatcagtataggcgactacatcaaggtgacctgcgaaacatccaccttgacacactactatgttgtccacaacggagattcgaccatccacatggcgacatacacaaccgcaggttagtgttgttcgtgcgcaaatgtgttttttatactcattataatcagaacctactattggagaacttcgatatatcgcgcgcctgaattcagccctgctgccgaatgaagagccattcggtgttgtctctaatattgcaggtggcactgtcgtcgagggagaggatgtggtacgtttttttctgaagctttttttcaatacaaacagctgacacatattagttcttggttagtggacaaacgcgaagcaagttctactcgagcgaacggtttattgatgaccacatccactgtaagaatacctctaccctggccgatgcgagtcgatttaacacaaacaggtgtctctggaagcgcgcaccgtgtctgcatgatcttaaatcaatatgagacatctgctggcggacctttccatcggtaagctcctcatacagcatgacttgatccagactaacatgcaccagtgatatcaacaccaacaatgttggttcttatactggcctatactggtacatggtatgtggaatctgtcgctcaatcagtaactgcctcttactctatacagaactccggacacgttcagaccgagacctaccgccagggcctgcacggcccatactcgatggtcttcagccgaagcggtacccccagttccacccttgacacgtcgttctttgccgatctcagtatcaagggatacgtcgccacatctgcgagaggctatgttacgggtactgcaaccggggctgactcgactttcaaatgggtggttcactggtaggtccgatgcaatacctggatgagtacatatctaactccaagacaggtataactccgccgcacagtactggacctacacttcgtcttccggagctttcacctcccctgctatgaagcccggcacttacaccatggtatactaccagggcgaatatgtcgttgccacctcgtcagtgactgttactgccggatcaaccacatcgaagagtatctccgggtctgtgaagaccggaacgacagtcttcaggattggagactgggatggaacgtaagttcattgattttaacccacataattgttccgatattgactgcccatagaccgaacggcttcctcaacgcggccaaccagctccgtatgcatccctccgatacccgcatgtcttcctggtccccgaccacctacacagtcggcagctctcaagtctcttctttccccatggccctcttcaaatcggtcaattcacctttgacgattaaattcacggcatcatcttcgcagaccggagctgcgacgctgagaattggcacaaccctctcctttgcgtctggccggccccaggttgtggtatgttcaagcacattcactttctatactcttagcatgtatctaacttttacacagttcaacagctattccggcgccaccccggctgccccgactaacctcaactcccgtggcgtcactcgcggtgcgtatagagggtttggcgaggtttacgacgtttcgataccggctggaactatcgtcgctggaactaacactgtaaggacttttgagcccagtcagatgatatgatgctaatccggcctagatcaccatcagcgttgcttctggtagctctggagacacttacctgagcccgaactttgtgagtatctttctggttatctggtctttccgatgtaagcttacctgtctcaatagatcttcgattgcgtggagctcttccagtaaataattgggacaaacgattgagttttggaacgcacagaggagcataggggaagtttctctaagtaacaagaatgcgaatcgccgtatcttccaatatcacttaatttcctgttgtaataacgccttttgaaggtaaatcacagaagatgtcataatatagactagatatcatatgtagaaaaagatctaagaaaaacacatagacaatgctcaaacccttgaatggaccaaccttcccccaacccagacagccttcacattccgatcatcgccactccaaacccacttctgaatcttctcctcccaattctccgtcccaaacagatcaacatttcccacaggaccagcctttacaagatctacactaccatcagaaacaacatccagcggactcgcctccaccagcttaaccccaccaagccgaatcagctgtacatcccacaacatccccctatcaaacccaccaacatcgctcgccatatcaacaaccgccgcgccaccacgcgtagcaaggtaaagactctccgaaacagacaatttctcccgtccatcagagccatcaccctgaggatgatcccttcgccacgcagccgattgacccagcaaccgcgaagcaagacaagcctggcgcgccgcctcaagaatactaggactatacccaccactaacatccgtccccagcccaaccgtaatcccctcatcaagcaacgtcctaacaggacaaatcccagaccccagcgccgaatttgacgccggacagtgcgagaccttcgcttcgcgcgcgcggatcagagaccgctcatcggccgagagatgcaccgcatgcgcgagaatcgtgcgcggcgtgagcaggttgtacttatcgtagacggcggcgtagctgcccgcctccgggaagagctctttgacgagcgcgagctcgttgatgttctctgagatgtgcgtctggatgtgcagcgggggcgaatagctcgctgccagctcgccgaggccctgtagtgcggggcgcgtgcatgagggtgcgaagcgcggtgtgacgatcggcttcacgagcttgccttctgggtctagggtgtggatatgctcgattgtctggcgggttgcgacgatggagtcgtcggcgctgaagtcgcggtagtagtctacgcagaagtctgggttgtccatgcaggcgcggccgatgaaggcgcgttggccgcgcgtgtggcagagcgatgagagggcgtttgtggcggcgacgtggttggttgcgtagtaagaggcgcaggttgtgccgtgggagagagtgcgggagattacttggtcgtagatttgctgcgctaggaggggtgtgtctttagggtcggttttggtttggtggcctgtttttgggtccggtggtgacccgaaccgggactctactgggaatgtgtaggtctctagccagtctaggagtgttgatgagccgaagaggcccgcgttggggtattgtggggcatggatgtgggtgtctgggtagatgtagttaatattaagatttggccgtccggattagggtttaggaagttggatttgatgcataccaataaatccggggaagaagaactcattttgctcctcactcgcggtgacaatcttcactctgaccttcgaatcatggccccgggtctcaatggcgtcgatattaacccaaccattcctattcatgaattcgatgaactgattctcatcactgccgtgccagtcccaaccttgaatgcggccatcagcagcagagacccataatgcgccttggttgcgagacaattcaggcttggagctagagtctgaaagaaccgtttgaatgaatgtgccacgatagacggtaaaatcatagtccgtttgcgatcccatattggcgggatatttaaaaggcccaattattggcgtagatatgatcaagttgcggacagatggcgctctccaaaaggactagaccacgaataccgatgtatattatcgatgaaaatgcagatcagtctctacagtggaaataaaaagaccgaaagaccaagtcgaaacgaacaaggcgaaaaaagagggtcaggcacacgtttatatctgtcttctggttacttcttgccaagcgagcggctgagataggtgtccggaaacggtggacccaagatgtggagaatttcgatgttgtccctgcttgattcgaatgttcttcagcttcctttgcggcattcaaggcttgattgtaggttgcgaggatgattagggccacggcgagtattggggatggcgggggtcggccgtctccgatagcaatacggtgaggatacggtatttggagcgggtgagtttttttttgatggtgtaatttacggacgggcagtactgtatggtcacaaagcaccgataaggccgtcaaaagcctcaagtttacatataaagctagtgaatgtcgtgatttgttactcttcttattgtttcaaagattttcttacactggatcgaattgaatgtctagaatattttttattctttgaattgttttgttcttggtatccatggatgccggatgattatgttgaatcgatccagcgctcacaagaatgtagtctgtaggtagtctttgttaccgtcaatataaaaaaaatgttgaatgtatacacagagaaaaggaagcatcagaacgagcccccatatataaaaaaaagcaatcagcgcggcatgggtatcatagatctttcaagatctgtctaatcagtatcctcgacaggcccgcaagtgcagaacaagttctggtcaccaaaggcatcatcgacacgagtcactgtcggccagaacttcttctccaaaagcaaaggcaacgggtaagcagccttctcacgggtgtaagggcggttccactcggtaatgagcaggtcgcgctgagtgtgtggggacatcttcagcacgttgccctcgcgaggctgggcaccagactcgacctcgctgatctccttgcggatggagatcaaggcatcgcagaagcggtccagttcagccttactctcggactcggtgggctcgatcataagggtgttggagacgggccaggacatggtcggggcgtggaagccgtaatcctggagacgcttggcgatatcaatggcctcgacaccagaggtctccttgaaggggcgcacgtcaagaatgaactcgtgtgcgcagcggccgtgctcgttggtatataggatcgagtagtagggcttcaggcgggagaggatgtagtttgcgttgaggagggtgatcttggtggcatgggtcagaccgcggtcgcccatcatgttgatgtagttgaaggtgatgggcaagatgctggcactgccccagggagcagcggagatgggaggggagaaggtgtcgccacgcttggactgcaggtactcgctgattgggtgcgagggcaggaagggacgcaggtgctcgccgacaccaatgggtcccacgccggggccaccgccaccgtggggaatacagaaggtcttgtggaggttcaagtggcacacatcggcgccaatctcaccgggcgagcagagaccgatctgggcgttcatgttggcaccgtccatgtagacctggccgccgtgctcgtgcaccaggcgacaggcctccttggcaccgggctcgaacacaccgaaggtgctggggtaggtgatcatgaacgcagccaactcgtccttgtgcttctcgcacttggccttcaggtcctccagatcgaggttaccggtcttggtgtcacacttgatgctcacaacgcgcataccagccatggcagcactagcggggttggtaccgtgagcagagacagggatcaagcacacgttgcgcttggcatcacccttggcctcaaagtacttcttgacaacacgaagaccggcgaactcaccctgggcacccgagttgggctgcacagtaacctcagccataccggtgatatcagctagctgccgctccagatcgtcaatcatctttgtgtagcccttggcttgctcagcaggcatgaaggggtgaatctgggagaactcgggccaagagatgggaatcatttccgtggtagcgttgagcttcatggtgcaagatccgaggggaatcatggagtgggccagggaaagatccttcgattcgaggtggtggatgtaccggagcatctcagtctcggagtggtaggtgttgaagactgggtgggtcaggtaagaggaggtacgctcaaggctggcgggaatagtggcgagaccaagagtaccatcaacctcgacgggagaggcagacttgtgagcggcaaagacattcaaaatgcccttcacctcatcccggccaacagtctcgtcaagagagagaccaaccttgtttccacccagacggcggaggtagacagaggcagcgcgggcctcggccataatggcatcagcttccgcagcactgggcagttcaatggtcaaagtgtcaaacacaacgccaccgtcagcgctgttagagcggacagggacatcatagcccaagctgacaagcttctcgcgcagcaatgacgtcatggacatgatacgctgggcaatggccttgaggccagcagggccgtggtagatagcatacatggcagtcatgttagcaagcaaagcctgagcagtgcaaatgttgctggtagccttctcgcggcgaatgtgttgctcgcgagtctgcagagccaggcgcagagcccggttaccaaggcggtccttggatacaccaacgacacgacctggcaccttgcgcttgtacttgtcagcacaggcgaagaatgcggcgtgggggccaccaaaacccatgggaacacccagacgctgggcacttccgaacgcaatatcagcaccaaactcgccgggggccttcagaacggtcaaagccagcaggtcagtggctacacagaatgtaccaccctggccgtggatagagtcacccagagcctggaagtcgtagatacctccctcggtatcggggtactgggcaagtacaccaatcaagtggtccttctggtccttgacgatcttgaagtcatcggccaagatgtctccaatcacgaggttgattccgaatccatcggcgcgggacttcatcactgcaatagtctgagggtggcagaggtgagacacaacgaaggacttctcggccttcttctgcttggaagtgggcattgtggcgtaggacatggtcatagcctcggcagcggcggtggcttcgtccaaaacggaggcattggcaaaggccataccagtcagatcagcagtcagggtctggaagttcagcagagactccaaacggccctggctgatctcgggctggtagggtgtgtagctagtgtaccaggcagggttctcgagaacattgcgctggataaccggaggcacaatggtggggtagtagccggttccaatataagtcttgccggagatatcaatctgcttccggtaggtgtccagcagcttgagcatatcggtttctcccaaacctcccagctcactggagcggtacaggctgatatcggcatggggctcggagaccttgaggtccttcgtggagagaatgtctgcgggcaggacctgcttcacgaattcatccaaggatcccaccggcgggtcgagcacggcgagcatctctgccgcggcgtccggggaggggccaatgtggcggcgagggaaggtatcgagaggctggaagatatccttggggtggatctctccattgtcggagacggagctagtatgaacagcacgacgaggcacaggctgagaagtagtcaatggtctccgagtgttcaatggtgacaatgaagatcgggcaattgagggcacacgaacacgcgaccgcagagcaagctggcggccgccgcggagggcgaatagtgatgccgccatactgagaccggaggataatgagggctttagggaaagcactcaacacatccacaagtaaatcagtgaatcaatgagttaggaggatgaagaagaagacaaaaagagccacagctccagaaattaatatttattgcccacgcctctttcctttccctgtccgatcgtccgatgacggagaacctgtcgggaaacgtacagcggcgataagaaattataagaacatttcttatctgaccaatcgcagctgccactatttgccactggccccagcttgaccactgaccgccttctgctcggagcaactagccggtttcccgtcggggaagtcacgggccattgatctacgttactccacgaattccccgccgaaggggaagctccgatggtctcatagctttccttgagcttcggtttatggtcgtttgggagaatacgacatactaaaaataaaaaaggcctgctttcattactatctcaatcccgcctaggacagaatatttcttcgggctcaaatcgtatatcggaaggctgcatcaccctcaatgacccgctttccccggtccgcctgcttattacagatccggaaccacagactcaatcccaggactagcaggacgatgagaatgttacacctggtgaaacaaagtcagtacacgaaaataatctgagacaggagggacaacgtacccaatagcggcatacattccgggtcggtactcgggtgcgtcctgttcccgaaacaccaagctactcacgataccaccgaggcctccaaagcccaccagtgtagcgctggagaaagcacgcgtccactgtccgcgcacattgttcgcctggtatgccatgcaggctgggatattagcattggcaccggcaacagtgaagaacacgccgaagtagcggacggcatcgctcttagcgaagcccattaatggcaggccaattatcgcgagcaaggcgttgaaaatgagaatcggggcgcgcatgtggtacttgtcgccaacccaggccgtggcgtacatgacgattcctgcgaacccgtaaggcggcgcgacaaggcattgggcttggccgacgccgtatcccatcccggacatgaggattatgggcaggaaatatgcgatggcgtaagtgacggtagtgagacagctgggatgcggttagcagtaatcgggtctgcttgaaaagggaacgcacaagaagatcatggcaaacccccagatcttaagatccactgccggtttgaggaactttttgagagagaaggcctccatatcgccatcgtttctgtccttattgatgcgacggatgatgaatgcgcattccctctcgtttaggaagttccaggacttgtgtgcgcggtcggggaaatcgacgaggaagaaaaagcacaggatgccaatacagccggtgatctatattttttgttagcttggttttttttttgggttgacccaactctccataccactccctcaaggatgaaaatccatctccagccggtcaggccctgctttccgttcaattgcatcagaccaaacgcaaggatacccgccaacgcagaagcaacacatccaatgagatagaaaacggagaatcgtttttggacgtcatctttgaagagtcagtactgtgcagtcgctcggagatattcctttcggccatttatcttacatcgggtataccagcaagacagcaagtagacgcagccaggaaagtaaccagcttccaacacacccaaaagcacacgcgttccaaccaacgcgccccagtcctggacgaatcccatcccctgcgtcggtcagcaacccaaagtcttgacgtcgagaaggcagaaatcccttacaatcatgatccccgcccagcatagaataatcgagcccaggaagtaagttgggccaacttttcgaatgatgacggtcatcggtggttggaagagaatatagggcacaaagaacatcaggacaacaatggactattcagaagttagcccttcgccctccgagaaatggaactcgtttgtttgaacatacatagcgctcccctatgtccaatcgcaattcctttttcaatctttccatgggtcagccatttttgaacacggtctcctcgatgattgtagtcttaccctgcaacggcggccatgctcaaattcgtccggtccatgagcgagatgcaataagctaatccagtcattgtcaccagacgcagatcaattctccgaataatcttcttctgctcctgcggtgtgaactcatcgtcatcgtcgctgggaaggctcttccccacgatgtcctcgatgcggtgatcagcaggtagtttctcatcgatgggagtcattgtccccatgctgattctgaattgaattgggatatttaatagaaagataagatgcaggggacagcaagaaaaaagaattcaattgtcttgggccagaaatagaagacaaatctgcggccttatcttacagaacgacaaggatcaagaatttatatatccaagtagaaacacaccgcacaataaaccaaccattcctaaaccagccattcaagatcgccgctcgcttattgcaacccgcttcaagctgcccaggaaattccccaagaaacaagacaatcgagatcgcaatagccgacagaaagtggccaagtgcctcgggacgagcacaattgtcgtatagcaagggaatacgccgcaatatcgtccgaaaaacaaatgagggggtaatcaccccactgtggacaaactgtacgagttatctcttacgcattgagctggttagcatcggtggcggctgctttgggagataatccgggggcgatggggaagaaatgcgggggaaggtacttggcaacttggcaaatggtgcgttgactacgtgatgcactttgatcccctctttcgtttggtgctttagtctgattgttgggcagagatgtcacttgtgggactcgagatgatctgttctgtatgtggtttgttgccaatgtttcttggttagggtttcttgacttttgattcacgtactttgtcattgttagcgggaaaatcaaccgggcccctcctgacttgtttctaaaatttcaagctgagtagggggatattccgaggctgatctcgtactcgtcggcgggtcaggaagtgccacctggttatgaggaaccttaatattccatctctcttgatacgtcgaagctcgaagaatccgaaagtataacttgccatgtagaaaagtatatataatcctggtcatgctagtatgatcctggtcttctgccggcagatagatagcgccgtgtatggtgatatcatcaccatgcatggataacctaggtatatccaagttctgtggcaagcggttggttcttaatacagcccactatagacgaatctgtcatttgacacacgtggtggatggatatccaccttataaagttgctataaagacacggagcctgattatagacggtggataaaaagtattgaccttactatcgtcaattaaattctttttttacacctcggttcgatcctaaaatgctaagctgattaaaggtagcttccatcatcctcgtattcgtcctcttcttcatcctcttctaaaaggagtctctcgcgttcttcctcatccacccgacccttctccctcagctgcctcacagacacgaaaacaaagattacgagtgatgttccaacaatgaatcccgcgattgccaagacaacattgattggaattgggtttccatcaaacgtatgatgcgtcaatgcgtcgagcccgtactgagagaagtttgcgattccggagaggcaaataatggcaccgtacacacgcccaaatgtggcaaagccgaatacttttgtagtataatcactagaaccaaggattagtaagtagaatttggcagggggggaaaagcagcatacgacatggccgagtaatagagaggccggagcaagacaaatagcaaaacggtcatataaccagcccaaactgccgggatggagttcagtacaccaatgaccgtagtgaaaagcacaatcagccccagcatcgttggaacactaaggcgatcaagcagaaagccgatcaccggcgtgaagagaacgcccccgaccggtagtgcgacgtcgaaaaaggcacctattttatttgcctcctcgatcgattcgagcatgtactcatactgcgagcgaatcgtggcaataaagtagttcatgcgaatcatttgcaaaacagtcatcagtgtaatcaggataaaccacggcgttgccatctgtttatgtgccggcaggccatgcaatacaccccacacccaactcgtctgctggcgatcctcttctcgatccgcacgcatctgcctttcatctctatcaccaagcaccgcatcgatctggcgaagctttttctttctccgctccgcccgacgtttcctcacccggtttagctccgacgtgctctcaatttcatcgtcggagtcgtggacgtcgcgtgtagcgtcttcggccttttctaacttgctctgcaagtttagagtcgagacataatcgcgcactggcatgatcgtcaccagcgcgatgaaaatacatacggggactatcagatagcccaaaaagaatttgtccggggtgaaggatctgcccgacttctcatagacgagccggtagaagaggaacacagcagcagaggcatcgaatgcaccagtcaccagcgcgacgatcgaacctgcatatttagggaacgcatttgcaatttggaacgaggggacaaataaaaaggtgccagccagagcgaggaagaagttccccgcgatgtagccatcgaagccgggttcatggaacgcaaaggccatgatgacagcgccgatggcaagaagcaggcaagcaatgaaccagcagatacgtgatccgcatcgatccaaaactgtcccaactggcagagcggagacatttgctgttatcgaagcaatagtgaagaacaggttgagtctagcatttgattagtggcaagcacatatccgggagtctgtgcaacactgtgcaacaagcatacccaaggtcctgctgtgcgcaaagctcaagcccttcatccttttcagcaggagtgcaacgttcatggtaaacgccttcctcgacgaggacaggcttgagcgccgcgaagccaaaaacgattcccgacgcactccaacacgcgaccacggtgacagcaacctgggctgaaagttgttagctgtttgtcttacactgggctgaagaggacataccaattctctttgtggtggaatgtttgtacgctggtgttccagggcgcgtttctgcgaccggcatcgcgtcgctcggaggctggatgacatcgtagctgattttccggcgaatgggaacgaaatcgcagtcatcgactaggtctggttcaagttcgcgatcaataccgtcaatagcggaaacatgctgcaccagtgacattgctctgtgttgaacagacggggtgttgtgtggaggaaaagttggtttgatcggcaaaacttggttctttcccttttcctgacacctctgatttttgctctttacactcgaagcatactagctacattctcaagctcattacactgtggaaatatggttattgagacaaggtatgtagctgtttgtcagctctgattcgctcaggaatttgcctaaattgccactgtcgtcaatttcgtccaatcacaaaggatgtctaggtcaaattaaggtgagggcatccatggatcatcttgactttataattaaagtattatattcctacctcttacctcaggggctaacatctacataatatatactatactcacttaataatactccttctcaagcagccgtggcagcggatttctcctttttgattgacctccattccatcgtcagcgcggggacgatcatcagacaggacaccgccacggcgacaatgaacgaccgctggaggccatcattgtataacgccagaacctcgctcaacttggtagcagggacagcattcgacagacctgtcgccccagccgccataatcttggccacatcaatcccctgaatgtggggtaggtttgcaccgaggtaattctggaagagcgactgagcgacagcgataaagacagctccgccgagagactgcgcgaagaacatcagcgagacaccaatggcgacctcatccatagggagaatagtctgcgccgccatggagggctgctgcattcctgtgccgataccgatgccaaacaacacctggtatccaatccaggcggagtggttggtgtccaccttgaaggttgtcatcaaccctgcgcccgtcgacatgaacaccgccgcaacaaacatccacgggacgtagtatcccgttgcggtgatgattgacccggagagtatggctccaacaacgagcgccagcaccatgggaatcgtgtcgatgccggatttcacagctgatgtgccgcgcacgccttggaaccagagtgggagcgtgtacagcatagagattagtcctccaccgacacacagggaaaacactactccgctgatgatgctccgctggtttaatatgtgaggcggcactgttgcgtctttcttgagccggatctgcacaccgacaaaggcaatcatcagtgtccctgagatgacgaacagcgcgatgatgcgcccattgctccagggataggttataccgccccactgcagggcgagcaggaagcagatgacagagggcaggaatagcacgctgcccaggggatcgaggcggaggatttgttgcttccaggtgcacggttggggcttgtgggggacggccaggaaaaggaacaagatgaccatggtgaaaccgccgatgggcaagttgatatagaagcaccaacgccatgttacgttgtctgtgaacgcaccacccatcaaaggtccgatgattgaggaaataccaaaagtcgaccccatcagcccgacatacatgggccttttggccagcggcacgatctgtgcgattatcaccgtcgcgccggaaaatatgccagctgatccaatcccggctatcgcacggccgacaatgaaggcatcagagttaggggcgccaccacagacggccgatccgacttcaaaaatgaggatcgcgatcaggaagatggtcttggtcgagtagaaggtgtacaccttgccccaggatagctgcgtggcgcaacttgtcagcagatatgcactcgcataccaactgaggtcgtctagggaattgaactggtttgcaatgcgaggaactgctgtagcaatgatggtgcgatcctatagtgttcaatgtcttgttagtatatatctacatgggcaatagagaatgcaacattcataccaaggcaaccaaaaacatagcgaacagaatagaaacaataatagctagcagccgggtccccgttggtaaatgagtctcatctttcttgacctccgagggcttctcggtggtagcttcctggtcgagctgcttttctatcgatcgaatcattgtataatacgacagtggttgaacttgaagcaagggtatctttgcaattgatctaaattaacaaatatgaatggaaaagggcagacttataaataattgattgtagttcatgatctcgggggggtgaagctgggttcggcgccgaataacatagtacgaaattcggttcggcgccgagctaagagtcttggctccttcttgcttgtagcttattctttcgccaatacaaccaacccttcatgctatccacacgctctttttcttctattaacaaaagtgtggcgtgacagtcatcgaaacatacaggaatgcaatgcatcgaaagagcttaagaactttcttctatttcattgtcgatatacctaataaagagtcactgccccgttaccacaactccaggaattcgtctgccactttagtgaggagtaagctctaaaaacctgtcactagcctagccaatgtcccattgatagactgatcgcttgccaatatctagtaagaagcataaagggtttgttcctgtctgacaccaagttgaatacaatctgattcgatcgcgatgatcgtcactcctgacaaatcgacgtgggggccgaactgacaagagctcgaggacttcgccacttgacttccccgcacagaagaacataggcgccccatttttatttctccttcggcggagtcctggtgcttgatggttgaatagtctctactagttgctcaacaacttcccgactgcaatcgtgaagctgacatgtccaactcaaaacccgaacgtggaagcaggggccgatatgctcgcttgctttgtcaaggctgcaggtccaggaaaatcaaatgtaatctgccagatataaacgagctgggtcctcttggctctccacaacccccggaaaagtcctgcgaacgttgccgcagcctcggtcttggatgcgttattgagcgttcgactttgggtcgtccatccttcaagcgcggtgaaaatgagtcaggtcggaagtcaaattctgcccactgtcattcagctacgcaaaatgaacaacctggcaactctctgatcaaggactactcgccctcggagtcgacgacgagtccagaaaccactcaagaaatacgtgcagtggctgacaagacggtgtttgagtctgtcattgaatttcaacacttttttgcctcggccttgggcaaagaccgaatatttggtgctacaattcctcggagtacttcaggctgcatgactcctctcccagagctggtgagccacgaaatagcgagcagtctcgacaaggagtaagcacctgccgttaccttgggatatcttgactgcttgtctaacatatgtcgtattttaagcctggcttggtataggttttttattcccggtctgccaagcttagtagacataagagaccgtctcaagggagacgacgaacttaatattggcaccaatttgctcttcgcattgctttgtctgatctcatgcgatacaacaggcaaatttgaccggcttcatccacgtttgaagtggaaccttcagctggctatttcatcctatgggcaagagtttatcttttcccctcccactcactgcgactctgttgttgtctgtattatcttggctgattacaggccaaccaccgtgggagtatctcaacatactgcacacagagcgatcaagtcgaccctatatctcaatatagctttcaaagtcgctgaaaaattagagatgctaccttcgcaactcaatctaagctttgcagatataccatccatgagtgatgaggaatttgaacatcgaattacagattctttgcaaggaatgaaaatcttcacccaggatatcattctagatggactattgtcaagaccagtccatcaactgcaagaagcgctggatcgcatggcaccccatatccacgtttatcaaaatgtcttcaggcatcgtccttgctcaccaaggattattttccagatacagtgggccacagcgagctatatgcttctagaatctttgaaagcaacaaaacagaactggaccaatccacaaagactatgtcatgttgtcgacgagactgaacaaaagtgtcttgaacagatcagattctgtgactgggcactgtcaaatacggctcagtcagggccgcccgaggaggtaagggctgctcgttctttgctggaatatcgattccatgcagtaataggacgatcatatggaattgcgcttcttcacatcatgatccttcggtccagagcctcaaacagcagcttctcaagtgattccgatataaatatccaggaagctagtcaaatgggcgccaaactctcggatgctatgagcaatacttctgatgatctcggcattcaaattgtgacattcatctcacgctttgggcgtcccttccccgatcggctactcgcagtgcttgaaatgttcatcaagggcacagatttaaaacttgatggcatacagtttcaagctccattccgggatatcgttctcgatatactcgccttttccagatccatcgtggagaataacagcatcaatgtcaagaacttaactggaaagatgagagaaaatgccgaccaccaagtcttggttcttgcagagtgtgctaaaagacttggtaacatggttgcctcgcctggaaaatcgattgaagctgcttttgctggcggttgcgtgtttgccgccannnnnnnnnnnnnnnnnnnnnnnnnnnnnnnnnnnnnnnnnnnnnnnnnnnnnnnnnnnnnnnnnnnnnnnnnnnnnnnnnnnnnnnnnnnnnnnnnnnnnnnnnnnnnnnnnnnnnnnnnnnnnnnnnnnnnnnnnnnnnnnnnnnnnnnnnnnnnnnnnnnnnnnnnnnnnnnnnnnnnnnnnnnnnnnnnnnnnnnnnnnnnnnnnnnnnnnnnnnnnnnnnnnngctgtttttgctggcggttgcgtgtttgccgccagcactaaagtcatgatggcattcattgatatcatgagagatctgaagaaagaaagcgatcttggaaaagctggcccggtgccgctaactgtgtctgatggctcagcagaagggccaagcatgagtacctttgaagataattccctagattcggggaatttgtggtctactgagccaataccaaattcttttagcgctgaagatttcgtttttgactggtccacgataatggattttgatgaaaatatgttgtacaatgacctgaattttgattttgcttcgtgttaaagcatttattggacaagatgtatataactctacgggtgcagaatataggggttgcctctaaagcaaagtgcatgaagagagcaagaagggaaagaagggaaaggaggaaaaacataatgacaatactcaacatagtagtacagatgattgttagttcgcttgacacaaaggtccaaacaatgcaccgcccgtcacctcttcccagccttcattgcccacgcatcgccagcaccaaaacacaccctctgggtcgtacttcttcttgatcgacagaagttggtcatatctatcgccgaaccagtccttcctccagtccggatcatacgggtcggcctcattcagataagttcccgttgcaggagccaaatctttcatggctgctaacttccttttagtgagttcctccttgactttttgaatttcctccgaacccgcatttgccggccacatatctattccttgtaacagaagataggctttcctccaagctggattcacagaggtatatggcacattgttgagaacttttccaccggcaacgatattcaggagcacagtgttgtttgcagtatgaaccccttctccgacctcggtggtcaaaatttgaagcaaatcatatagctcttgttctttgccggataaagaatctttggcgaagaatctcgatgccatgagtggttgattattacctgcggacgtgtggtgcgtcgacgcataccatgcggcccacgaaggatgagtagaccatttagatgataccaggtaatccgttccatttccaggaagcagatcatcaataatcactcggttcatcagatcttttgcatgattgatcgcttcaattgaatcattcgcgaggaacttgatgaagggagcgctgtatacccaagattcatacttccgggtgaggaaagcagtaccggcgaacccttcatcaacaattgcaggatatttcgaggccattcgagccgtggcctgcaagactgcagaggtattgtggcccaaatccgcaatagtcaggtcatggtaaagggttggacgagtaggatacgtcttgatggtagctgatatgacaacaccatatgtacctccccctcctcctctgagggcagtaaagagatcggagttctgacatgcgttcgccgttacaagctctcctgacgcaaggacaactttgtattcaaggacttgatctgttgctagtccgaattcgtggctgagggaaccatgacctgctccctgaagaaatccgccaatgcatccgacggtcttgcgttgtgttagtgagattgcattgcttgagttttcattcaaactgatgtggacttacagggtcacctcctccaacaacgacatggcggtgtttagaggcgaaactgtagacatccttccacacatatccaccctggatagtgatcacacttccagtccaattagatgggcagtttccttccgaataattgaatgtcttatgaaaatgaagcccgcctttgatatgctttatccagatcgacaaactgccgtatccttgcgatctatcatgattttcatcgtcagtcataagatacttatataaagattaaaagtccaccttaccgctgtgagatgtcatgcccagtattcttgataacgagtcgcacattgttctctttggcaaaccttatgccagcagcgacgtcatcggccttggtagccttgatggtatacgcgggagaagttcctagctcgcacaacggatacgcggctaccgaagcgttgattggggggcacgtatcaacgagtggatagctatatccgattggagattccgggatccagaattcatttgtccaatttgaagcaatgcgttgacattctttagcgctgtatccagggccgtgatagcatgctttggcgagaggctggttttgaagaagttttccttccaccgtagagttgagagaagtccatttcgaggctgatggccagcaatcgtctgctggtgtctatttcaacttggattagataatttgcagtatacagatccatcatcatagaataacatacgcatttgcatttagcaaagacggactgggctccagtaaggagaaagaggcttttgagaagcatgttcattggaatattcgttaaatgttttactgattactagcgagagaacgaccagccgtatttatatcaattatatattggttgctttacccttccgtgtgtggcttgaccttcaggcttcagttcacattgatgtaagcggaagcggaatcattgaatcaatgtaccgcaccagaattccatggacattgtggcagtgcttcgcaaattctcaatgcccaatactatgtcaacggaattacagcaaggcttatttcagtcgagtctcatatatcgcaaatttcatttgtaaactgagtgcgcaaatttatcgcgcaaatttattatccgatgaatgatcgtcgggtgttggcgccacctcgtcattcagatcagcgccctggccgcagacaaagtaacgcgatgactgcgatatgtgcgatatacagcgtcatttacgaagccagcctgataaaatgaggtttataccctatgcatacagttcacactttgtttctcggcctgtacccgagacaacactaggccatatatagctagctggaaattttaactacctataagtggccaataaattaccacttgtcctaatcaggactcgacttgtttcgtgtacgggccgataaagaaagcccgagtgtctatatttatcgagggatatcctgcattggtatacatatatacttcttgtgacgataggagtagtttagtgagttattggaagaaccctctctccggagaacgaagcagtccacgctttagataggaaggctatgcagtagctaagcatttatttccggacagaaaattccgctctgcagatacagaaatgcgcatgcacgcaacagagaaacttgaatgacgatcttcgcactcctgaccattattggctagcactggggcctacagactttggggattggggctaagcaatgcaaagtctggggctgaattaaggcccaaaaaatcaagacttttcagagggatcggcagtgcgccctagacatgtaagattttgagtaagattttgggtttacgggatagataaaaggtgggtgactcgggggtttccttttcttttcgcaatctatttcatttcgtcttttcacgaatccttatatctacttttgtcggctttagcgctcttcaaaatgggtcctttaaatccgagacaagcggccgctgggagctatggctgctctatacctgatcacattgaaaatggtgagcgataattgctacgcatggattaatacgccaactaacgttttgaatagttggtggcggaccatttgtgggaaatctctcattctaccacttcaacatgattgtttccggtgcctgcactatcatagtgctgttcttgactttcggtcttatgggacgccatgcgatgcgcatgagtaaccccgaagaacaaatcaagtaagtccaccagtaaggtcgagacagccttgcgatactaaaagcatatacaggatcatgcgaatcgtcaacatgattccctcctaccaagtcctgtccttcatctcgatctgcgttccaaactcctatatctatctacaaggcttcaccgaggtattccagggtattgctctatacgcctttctgatgttactctgtgagttcttggcccccacggaccggggtaaggtggaattcttctcttcgctcgagacgaagagacagtggcaaccaaagaagaagagaaacggtcttgcgttctttagtgtaagtaccctgaccattgaaacgcacactatcgaatgctgaccgaatcttccctttagttgacctggtggtctgtccttcaatatccaatcatcacctgtattacagctgtcgcacagctggtgacccagttgttgcacaggtactgcctttcaagcaaatcaccccacttcgctcatgtttgggtatggatttacccttccaatacgtccccatatacagtaaagagagactaacatagatgatagatcacagctgccacatctctgtcaacatcagtggccgtcaacgccatcattcaattctacatgaacatgaaggaacatatgaaatatcaccacccactcaccaagttgctggcattcaaactgattgtcggactggtcatattggaaaagatcatttttctcatcttggagagcgccaatgtcctccacaacaacgacacattgacctacgtcgacgtcatgataggtctaccagaaatgatcatctgcgtacagatggtcccgctatgcttgttggtcctttacgcttaccggacaaagccttacgaaatttccaacgcgtctcgcaccgtgaccctgcggcctcaagagtaccaggccatcgattccgatggcgacgaggaggtgttgacgagtggattccagaaacgctaccagggtggctggatgggactgcacgcatgggccgcttacttgaacccgctgggcttgctcatggatgtcatatccgctcatagaatgatctccaaagctcgggctctacaaagggcgcagatgaaggagcaagcccagaaggaggaggaaatgacaagatatgagaccggatatgatactgccgagggagcatgagttttcacattttattatcccagtgaagttacaggcgatctagactagattttatgcacgatgaatatgaatgcacatccgcgatgactactatctgaacttggtggttgtgaattgtgaattactgacagaaagcttgcattgacttctatttgtgcttggctaaagcattaggctttctcacaacagtagctgattaactatcagcttatttccgcataattgcgcgtggcggagccaaaagcacgacgatccaccgtactttagcgcaaggtggagagtttaggggcgaagctaagcccaaaaggggaatccagtagcgccaagactttttcaaaagagtggggcatcgcgatcggcagagcctctggcccggtccctcgtggcttccttccctatctttttgccctactcgtagcgtagatggtcacgtatggtactcgtgttgacatgcctttcctgaattatttgatcgttcctgtctcttcattgccatcttatcaatttagctactttcaacccccaaaactccatcaccatggttgaggtctacgggttctgcgacccaacctttcagtcgcaagtagctgctgggtcattccatcgggtatagcttcttagcagaggctacaaattttgtcacactttcctagactacatgacctcattgtgtagctcaactagtcgactgacgcgggattccactcattctctgacatctagagtgatatttccaaaatttcggttcaccttcgttgtagattgtggaatttgattcggcgcgcgcaattaattgcgcgctagctttagaagatggcgggggcggggttggtccataagcgcaactaattgcgctttacctcgtttacatatttaggagactgtttgcacatctattttctgtttgcatgagcttgatttcttccttttcgtcccaaagataaacctcttcttcaactcggattggccgacaccatggagcccttcaaagacaagataattcctggccctggagatctccccaacgtccgtgcagatgcccaacgcgttttccaggtcctcgagtcaggaggtgtggttattctaccgaccgaagtgggctacggactgatggccacttctgcggaggccattgaccgtgccttcgccgttcaccttcgttgtggattgtggaatttgattcggcgcgcgcaattaattgcgcgctagctttagaagatggcgggggcggggttggtccataagcgcaactaattgcgctttacctcgtttacatatttaggagactgtttgcacatctattttctgtttgcatgagcttgatttcttccttttcgtcccaaagataaacctcttcttcaactcggattggccgacaccatggagcccttcaaagacaagataattcctggccctggagatctccccaacgtccgtgcagatgcccaacgcgttttccaggtcctcgagtcaggaggtgtggttattctaccgaccgaagtgggctacggactgatggccacttctgcggaggccattgaccgtgccttcgccgcgaagcgacgccggccaggtcacgctcagggtctatatggcacacatgaattgcaccgggaacttcacatcctggacgaccagcggtttgaaatgacacgtgtgctagtcgaagacctagacatgagcttcatggctgttgggccatgccgcaacggtcatcatcttcttcgggctttatccccacaaaccctctctaaggtcacaaaggacggcactatcgctatgttcatcagctgcagttcacttctgagagagatttgcagactgaatgctacatcaggccagctcatggtaggctctagtgcaaacgtgtcaggtggtgggcagaaattccgtgtcgaagatattgaggatgagctcaaggaggcggcggatttgattgtcgattatggtctgcaacgctatcatgtatatggacgaccttctctcatcatggattttgaccagatgaagattttgcgaatggggtcatgttatgaactgttccgcgagcgcatgcggaagttttggggggtcgacttgcctgaggaccctgattatcgtgcttgagacttttgtttaaggcgaagccgaagactatggaagacattgttcattcctcgactagacttttgtatgcctttcctaaatgtcttcgcctacatttgataggtaccttgtacttcacaacctagttattatttagtctagctcatcctctctagtgcacattacaactcccaaatactcaaccaagcgctattaggtgatgaacaagcaaacagaataaacgaaataccaaaccaaagtcccaaatcaagtgtggctccccgaactttccgattccgaatcccactcgtcatcccctccagcactttcctcctttgcagcaatcacaatccacaagattttattggcctccttcgtcttcttcttttcctgcctctcctgtctccttgtagtcccccgatctcctctcctccctgacctccgatcttgcctagcctgatcctttatcatcttctcattctgcttctgttcggccttgctagcttcttttgcaccccatttcttccaaaatccatcaggcattgttggttccttaacattattgaaggaaagtgacataactcgatttcccaacaaactcatgcgctgcataatggggtggttgttactttcagaagcatcctggtactgctgacgaacgaagacattttcttgatcacccaagccaacatattcaagcatcttatccgtcttgcacatttggacatgcaaacccttgggatggaaaagctcctcgttcgccttggctaggtacttcttcgtgcgcactttggttgtaactgatgagctgaccccagctaccacgttgacactcacactgaccatctgcacaatcatggagggggccatgccgccgacattggcggcgttgttggcggcttgaagggctgggttcgctaggaacgcttcgtttagttcatcgatgaaaacgataagttcatcggacgagatttggtgctctagttctggtacgcggacgcgagcgaatgggctcatgttctcgccgttgaatcttctatgacttatctctgggtaagtgatacattggttagatttggccactaattcacggataggctttatactaacgaggtataacacagggccgagatacgcttggaagctggggtgggagctgaagtagctgtgttggggggtagggttgactttgctgggctactaattcgttgccagcatagagttcactcggcggaagtgcaggtggttgctgtctcgcatactgggcttctaacacgttgccagcgtagagttcgctcggcggttgctgtctcgcatactgggcttctaattcgttgggagcgtagagttcgctcggcggttgctgtcgcacatactgggcttctaattcgttgggagcgtagagttcactcggcggttgctgtctcacatactgggcttctagttcgttgccagcgtagagttcactcggcggttgctgccgcacatacaactcgttgggagcgtagagttcgctcggtggaagtgtaggtggctgctgacccacatactgctgtggcgggccgtacatttgcctgggattgtatgattcttgcggccactgcggctgtggcgcgccatgctgctgagtttggctgtattgttgttgttgctggggatgtccgtactggtcttgccctggactgtactgttcgggtggataaccctgccttcgttcacggtatcgagatcggccacccgattgtgcgtgtcgagggtcttgtgcaggagctctttttcgggcctctctcctggctctgagcatgacttaatgcttttgaagaaagaattcggatgaaagtgcgttagctaatgttcaacaataattcaaattgatttgtagatgacgttgaaaagaaaaaaaagccccctccaacatgtcatgccgtgggttcctccttattaacaaataacactataataccacagtatccgcaactcaaaacttccccaaagaatagaaccttcgaccaatgacctgcgccaaaacacgaaatcgcgcatcccactctgcgcagtaacccaaaaggaaggcttatttccgcataaatgcgcgtggcggagtcaaaacacgacgatctcaccgcacttccctacctgcattggctagcgtaaagcggacagctttgggggctaaaatgtgaagcatagcctggaatctggtgtggccaagaattttagctgaaggagagtagctaattgcgtcgctccgcaattaaatcataacctcgtgtgtgtatgtcacatgaccgttctttttcctatgtacaggctccgaaatcattagaaatcaacgcggtgaaggattagtcggccaactctggcagaataatccaatcggcagaataaatatagactaggcccaatctagctagactgttaatatatagtcacgtgggcctctcgggcatgtcccaatggtccctacacttacgtagcattagaagtaagagtcagtcgttttgctctgcaacgatatctgggcggccgcaggctatccagattactagtatgtcatattccagggctgaccgtcgattttggaatcaataaaccttctcgttagaataaattaatgcccgaggtccaaggcagaatcaggcagaatcaggcagcagggagtggtcatatccaaaggggggggtggctgtatcaatgccccaagaacaatggtactccgtagccacttacaatggcattaacggttccatgggtcataaagaggaacaaggcacacgtaaataacaacaaacaccggccttccttatttgaggagcaaaaaagaacatcaccttcatctgcagcgtttgagctcatataagatatctgaataaggtcagatgaaagaaagaaaaaagaaatacaacttctcaaattattctatgctgtagatgccaagagttaatatataaatgccatgttccagtcgtcgacggatgacggatatgacgtatggaggcatgtgccaatgacgtagccctagcgacccatctacaggttatatgtcaactatgtgccatggctgaccacttttcatgaggaattttgcatagtccttggactgactcgtttgtccttgctatttgagacgggaacaatctgcaagaagccgaattgccggaacaatcaaacacttcatccgttcgaaacccacaaataaaagcatggccaacatatcgattagtgcccctggcctgagcagcggcgggtttctttacaacaatggcaacaataatgcgcgactatgcatcacagccgaaaccgaagatttcgatatcgagatcatcaagaactggcaggaggaaggattcgacgtcctatacctcccttataacggcggaggaaaagactacgctcgtcggttgcagtctgtaaaggacggactcggtgtaggcgaaaactacgccgtggttggtatgcacagaacttctctgaacatataaactccgagtgacaaactgaccaacccgattcctagcctacggcgacgctgcggactactgtctcgggtactatatcaattccattaacgccagtcgactctgcgccctggtcgcgtattaccccagtctaatccctgatacgcgatctcggttcccactctcactccaggtcctcgtgcacttggcgggcaagactgtggacgtacttgttcagcctgtcgcacttggtttgcaagggaagaaacgccgccagacacggccgatcaacgctggtatcgggactggagagcgtttggatttaggatacccggcgtttacgtatgataatgccgtgcccggatttgcggaaacagatctggaggaatacgatcgtctgtcggcggagctagcttggtcgcggactttgaaggtcctgcggaaggggtattccagggatccggattacgagcagcggtatgagcaacatgtggaaggtaagtttaaatcgcaaaaccgttgagccatggcggactaatactttgttagccaagtttttctcgtcgaacgtcaagaaaaccatggatggttacgttcaacacaaaacccctagtgtcacctacacgccgacaatcagcggcggcatcgggaaaaaatccttgcgccatttctatgaacattacttcatcggcaaattgcccccgtccatgcgcctgcgactgctatctcgtaccacaggatccgaccgcatcgtagatgagctgtacgtcagctacgagcacacacaggaggttccatggatgctaccgggcgtcccggcgacaaacaagcgagtcgagatcatcctcgtgagcattgtcagtttgcgcggggggcgtctttactccgagcacgtgtactgggaccaagccagcgtgctcgtccaagttggtcttttggacccaaagctgctgccaaacggagtccagggtgtcgaccgactgcccgttgttgggcgcgaagctgcccgtcgcatcctccatgaggatacggagcttgaacaggaagattaccataacaagatgatccgtcgtgcacgtgcccgcgcgagaaggagcttgaatcagagctcccgcctgtcccaggctggcgatgagtctgccgctgacctgaagagtgaggcggagcagtcattgcctgacaggagtcgggataagggcaagtcggttcagaaaaccaagcctgcaagtctgcagcgagcggccatggaagcggctgagcacgggggtgatgatgacgctaatacggagacggagactagtgtcaaggctaggtctgaggctgacaatcaggctgcctatgtcgaggatgggggaaatgatagtgctgagaatgggtctaagcagacatgacttctcactactacttccctttgtcatgataaccacgaagacattaccatagccttttctctgcctccagagattgaaggattttgttgggaatgttcttccgattttttaagcgactgtattttgattatcagtgatgttgtacatgtcgatctcttctgtttagcattaatgattatcactactgtggatgcgacgatgaatatgatttgtatgtttgaacagatattgcaacaattgagttgaaaattgaagctctgagataatgaagtacagcgccatcgaaggcaccaaagaaaccattatatatagtgtagcatactatcattagcaatcaatctgacttctgttgatcactccttttctcttagtcacatagtcagatacgcgtaactagttatcatatggaatatatatacacggattcatcgcggatactccaaaggaaatcatggacaaaaacaaagcctagttataagcatcgagtcatccccgaaaaatgttccaagtggctcaaagacatatttcacccaatatcacctcggctctagttaaatgatacggttcctgccattcacagttccagttcggtcgcatgtcctcgctggctttcgaaggtgcagaggagccagggttcaaatttaatgaatttcgggtagaatccatcatatcaccatggcatgagaagcataatatgagagaatgcgaaacataatggcacctgaaggtattaaatgacacaaaggaatacgtgacgagactttacaaggcataaaagacaaaaaggttgatgcgaatagagtttaccaagttcatcggacaaagtggggcaaagtgggacttagagatagggaccccatcattatggcctagtggtaaaatacgctgtattctttcctacctgtacgtcaagatattgtttttgtacgtgtacctaaatacaccaactggaaggtgatagatgagaagaagttcagggttaagattagaaactaagcaatagttagccaattgactaactcccgtttttctcaagttcaaatagacaaaaccacgtaaggcagggtctcatcaacgatccgtgggtgcaacttaaaaatataacctccacaggcaagtgtcccattcaactactgattatcgatttgatgatgccgaaaattgctgacctctcgccgacaacggtgttaccgataccaatcaatcttccccgcgccttaaagccagcaacgagtcatgaacaaaatcaacggatctgtttttcagaagccaaaagcacaagacgataagggtctaaaagagtaagcaaagtctttgttggttagatttctgggtgtcctaaggacgttcgttcaactgcttaccttcatcttgtaaaatgagacgagggatatggagtcatccactcacacattgtagaaggcagcgttgatatacttcaaacaggccctaaaacaaggactaatcaaaaatccttgttctgatttatgggcgtactggcctcgtgtttagaaacttactattgcgacattttgtctaccgagacgcctgatgtctagagccaaatataccgaatgaaggaataactaaattccctcgacacctcaatgctgacctttaatccagaaggcagttcaacatcgatatagatatatagaggcctcaaattgaaaagagggtatgagagctgcaggtcaggcttactaattcgaagcagcgcgttgatggcctgcatatgggggtaatcggtataatacgtatggaagaaggccatgagttgtaagaaagaaataatatttgctcttggtcggacatatctactctgaaagtttcgatagaacctttgctgtattagtatgttcatgaaactagttatagccagatacagatggacctgggctcccagaaactagtaatcgcgtgctctcaattctaacattacctacaatccatccattagtataactttaataaagggaagattggagggaaatcaccaagttccaagagggtgttttaaaattcagagggttagtcgattaggccctgcggtataagctctagagggcaggcgggatgctctacattcttctttttgacacatcgtgacttctcctaagtcctgctttttattctctctttaagaagagtcagtaacaatacattcgacaagtggaagatataatttatgttattttgctgagcgaaacgaagcaaactattatagtcgttcaggcaagggaatatactaggcctgatttttgagatttacgtaatagaagtagcagtcctaacggatcaaacattacaaaaaggactattcttcctcaaattttctgatctaatacacagacacttttcagaccaaacttcttctcatcatccgataaacacaaagcttctagcacggacaaggcctctgccgcaaggtatttgttctcccaggtcttttgaaaacagaataaccaacaagatcagatcacgtcaacatgtgcaagagaacctacagtagaaggaagcgggcttatgaaaattatcataacatacctggccatctggtctctgatggatgcaacacctacggggtagagactggcagaaactatagtattctcggtggtaccacgcaggttccttgcgattactgcaaggccaaaggcctttaggcccaaacagccgatagtaagtggtacgaggtcgcactaggtgggcctctgccatgatctacttttaagtatccttgtcagttctccttgtgatgcttcaaaatttcttataatctgaagacccttctagaattccttggcaaccttgaccgttcgtgaatattgcatagcgaagtatcgacaattcatgacctatgtagtagtgatgagctactacatgctgagttgggataacgcggcagtcattctttctgattgttcttgtgccgttattgagtttgtgttgttcttttggaaggtccgtgcccgcctcataagtggggttggcgcggggatctactctattatctaccacgtcgcgccaaccattgtggtgaaaattggtgaaaactgttcatgccgacctgacccccgaagaaaaggcaaccctaggggagcacattttgatcaagaaatcgcgttcttcaagggtcttgataagcttcaagatcgatgtccagatattgttatatgctttctcatgctccctgactatctttttcgaccatattgtacgcatgggccactcttcgctcgcttatttcactaccaggagcgggagccaacaataaatcgctgggtagggcgagttctcagggtcaaggagtacgaggatcctgctctcgtcgctcggtagatataacaactcacctccgctcttgagtatgtagagaaaataggcttctatcacaatgttctacattcaggcaactgtcttctagacagtaacttgaacttaaaactaactgattttagctgtactaccactattagacaactgcttaaaaatttacatactccgtaggccataaaaatacttgctagaccgttgaaaggcacatacagtctttattctaccagaactgaacagtttacagtcgggaaacttctatacctcatataatatggttataaaccatattataacattgacaacagggaatgggttaacagtagagggtctgaccgatttaggaatatagagtttccagaacttaatcgcaatcaagttcttaataggcttatttctacttattggctcaatatctatcctacaatagccttcgtagcgtactactttaagcgcaagacaaaggatatggtattgagtctagaatacatccccattgactctgcaaaggagacaaaggcctatgaagcattgattcgcaaaggcttgctgggacctgagttagctctccgcttccagccggcctggagaatatacctacatgcttttgtacagagaagtatgtttatttggcaatcttttctacaaagaaggttctggatctggtcctggtgattggttgctgatactttcaggcatactttgaggctttgactgtcctcatgcaattgaaagacttctctttgttcccttttgtagtgtttaggcctaccttcgtcttcatgaatatggcagtaattagtccgtcatcatcgattaatctgacttctgttgattttattctgcaagtattgttcattacgttgatcgcgggcttgctaacttactaagatatcagccagtgatgttattgccaaccacagagattcttcactgtactataagataactacgaatacgaccatgatatcactagtatttttgaacgtcttaagaaagagtttttcgtaatccaaaaatcaatgtcaaatgccaagacgctagccctatccagacccacataataacgttaagctaaagaaaaccttccacggtaccttttccgttttaaggttaaaagtttgtttcaggttcatttctcatgccacacttctaatatcgaccatctccttgtgactcgtctgagagtcaacatcacgtgtagccgatcgggaagtcaccaatgtcttcggagagaagatgttgaaggtgaccatagtcaagaacatcagagcagcatcaaagacatacaagtacacctctgtcgacatgatcggaccatttgtacccgtaatatactcaatggcacggaagatagaccgaatcatgataaacagactagccgtgtatagcacaaacaaacacttcatccacggcaccgtggtggcggatgtagaagtcccatcacgggctttccaaagccggtaatggaacacaccagcagtcacgacgaagaatccgaagaacgcaatttggataaaaagaccggcaatgatgatgtcttgtcctagagcaagcttagactgggtctttgcggaagagaggaagccgccgccagcacactgagcgaggaaggagacaacgtctccacagacaaatattttggtcagccagttgactcggataagagagagcttttcatggccggtggagataattgagcggcccaggaccatgtagatggatgcggcgaagaaggctggtgcgagaaggagcaagagtgattgcatgatatatgggggtgttgtccaattggggctttctcgcgagttaagatagcgaccgaggtagccgataacttcaactataagtaagttagctttatatctccgttctcgaataagatatatactgacagattcctccgataatgaaaggaatgaagaaccatgatcgactccgtatcatttgaaaaatgtgcaccagggtggtcaatccgaagagaacaacaaagataattgctgcaactcccgatgggttatagttgtagagagtgtatgtggattcgttggccattgctatggtttgaattgagtaaaggagaagacgtaattgaaaagtaagaatcgaatctaaaagcaatgttgactatgaagatgtattgattgccggccggacgctttcatatttatataacaattgcattgctgtgaattttctgcgagatctagtgctgagcccgaaaatctattctgggttcagatttgggttggaatccgagaagatttagacagccttgtttctagaagcttattgtgggtgtatatcatgattgtggcttgggacgaagttatatattctaggctgccgattaattttgctccctacttcgtcactcttgtagacatgtcaatctcgaaactgtttgaagatcaaagatccgaacccgaaagtccgaataagagtaaatctcggtctcttattggttgtaggaagcctcgtattcgtaactttatctctcgtattcgggtccgtgttattatgtagcctggccatctgcaggtgttgttcgatgaaaaagataaacttaagattactcaagatctatatcccaagtttaacatgtcaattgttctgcctgaacaagaaatagccctgttcaactcatgtggatcatattgagatgatccaaaacgttgatccaaaaacgagcccgtgtgatcatcatggagaacaccaaaaagaattagtctcaccgtggaccggagtgaaactaccctggtcatgcgtaccatggaagcagaaaactgaaggattgcaaaactacaagaaaggaccgccccctgcgattttctgagaagcatcaatcacagatttgattctgacagtcaaaatgcagcttctccttccctttgtcgggctatccctttcgggtcttgcatatgccaattcgagcagcgcgagcgcctcggcgactgtaacgggcttcctctccacttcttctggtactcttcaggtccccaagggagcttcatgtgcttgcgagaagctttctcggtctatgccgaaaagcataatcctccccggtgcgacaaactacacgactcagacagtcgataattactgggatattcgcgcgaatctttctcctgcgtgtgtcttcgtgcccaatactgctgctgaagtgtcgcaagcggtcaaaatcatcggtgcctgtgatgcgcagtttgctgttcgtggcggaggccacatgaacgtaagcttctatcgaatagaaactatgaaataatactaactctctactctacaacagtatcctggagcgaacaacatcgatgcgggagttctgattgctttatcgaatctgaactcgatcactgtgaagagtaacaccgtggaggttggccctggactcaattggtacgaggtggactcagcacttgagcctcatggccgtgtctgcatcggtggccgtatgaagaccattggtgttcccggactcagtcttatcggtggcttccactacttcaacaacaagtacggctacgccatggacaatgtggtcacatacgatatcgttcttggaaatggaactcagattactgtcaacaagactttgcacagcgatctcttctgggccttgaagggtggtgcaaacaactttggaatcgtgactcggttcgagttgaagacttacgatattcctaagatcagcacaactattcaagttttcaacgagacacacattcccgactatatctctgctgtctgcgaggcggctaagctggacgatgaagatcccattgcggcaggcatgatcgccactatcacctacaatgcgaccaccaaggtggcacagggctctgtcctcggtgttcaggagggtgtcagcagccccccatctcaattcgccaactttaccaaaattccagcaacccaaagaattaacaatgtcactactataaagccatgggttgaggtccttgactcccctaagcagatgatgcggtatgtaatctcgcctgtattgcaattttcactttactgattacttagtgtccaattctctcacaagacgatgaaacccgacgcggaggttctttattcgatttacaaggcttggaaagccgcagtcgacaagatcgccgatgtccagggtctttacccgacttttgtcatgaatgtcatttccccgacttcagtccgcgtggccaagaccaacggtgttggtaacgtttggggtctcgaagaagaacctcttattagtaagtccttccaaacttagttcggttgcgcttcttaggcttaccattactgtacagtttggcaactcagtaccggctgggacttagcccaggatgatattcgcatggaagcttgggcacgtcaattagttgagcaccttcacggtatcaacaaagagctaggtcttgcttctgagttcatctacatgggtgatgctggtgagtggcaagatccttatgcgggtttccccagtgagaacgtcgctcgcatgagaaagatcaggtcttcttatgatcctgcaggggttttctccatccttagctggggtggtttcaaattgggtctgtaattaaacctaagttgtcagcttttggtagatctggcgatacgtccccttaagtgacattcatatttatcgtgtttatagaatctctatagaatcaacccacttcgtaaccatgagatcttggttttttgatgacatagtcgcgacgtcaacagcgagggagttaaactactagcatcaacaatatatcaagcgaggctgtcagagccgataaaattctcgcggaatgatcaccggccaacctcatacattattgtcaccaattatttttgacctgtcatctatctggacagaacgcacgaataatgtggcagtatttatagcttccaagcatttccaagcctttctagaggcgaacagccgttcaatggaatgtatagggagtgcccacataccacacgcgatcctagatcaacatcatatggacccttcgggaatggaatgtgcgatcagacaaccgattgagtgaacatgggattttttgacacttgccagcccctgagtatgacgcagaagttgcattcgaattttagatacgtttcatgttcagcatcatagccattcttccccgccatcccattatcgcggtacaatcgtataagaagaatttgatagggcgcactaggtatataagagcagtagatgcgcatcttgctgtctacgctttgcaatcacacagttcaatttgatcatcaaactataacttcactgacattgaatcttagcaaccatgcattccctcgccacctcattcatctccttatccctactatcaggcgcagtccatgcccaaagcatcgctcgtgtctggacacacttctacccaaactgccctggcgagacattcagcaagctggacacatacgaagactaccaagaatccggcccatcccaagatatcaccttggacagctgcaaaagcttccctgtcccctcctacgagcacaatctcgtcagcgccatctctgttgacgccgagctcctcacccacaaccacgacctccccttcctagaaggcggcagcggctgcaacatcagcgtgcacgaggtcccaggctgcatcgacccgcccctaatcaacaaagagatccgaaatggcgtcgaagtcagccattgtgtgccgcgccagttagtcgcttatagccaggtctgggtgaattttgtctgcggcagcgatagccctctccacaacgagaacatcccccagacgacagaagagaacaagaaagcagacaccaagcagtccatgcctactgctgcgcccgatgcgcctgtgcgcactgagaaacatacttccgtcgaggatatcaataatatccagacgcctgggtcgaactcggattcgtggcgtacgtcccaggttgtgaataaccagcgcgagccggcgcaggagagccgtgttaatatggccggtcatgcgcagagtgagcagatcgttcatcagatgttggagttgttgaagaacaggacttcgcatatcgtcactggcaagcatcatgctactcacttgaatgttacactgcatcacaatggcactaccccaggaaaccacaccgtgatgtcacgtcggcgtctatctgttttgcgagatcgggctggtcgttttgtttgaatttgttttgggacgtctgtctgagcgtttgatttatgtttgatgaattgcaatcatgtgtgtataccgatcaattaaaagtctactgtgtatgtgaaaattgcgcaattccctaacccataatactacataatagtggacatagagaatggatgcgatattcttactcagaactcaactcaaagtagtgtaaaacaaaagcttcaataggtatggccgaagcaaagagtctacaggattgtatatcatttctggtctactgaccaaacgaagtgatattttgtgtcaatggtagacacacatcagactttacaacagcaagaccttttacggtcattccgacatgggtttagcaaatttaccaacgcgtagtcatgatcccaagttaatattctaacttgtctcttcgtcggtatctgtagccgcctgcttccgactggcagcctccttaccagcaaagctgaacaacatgcccagatcatagatcactttcaagcatccagcaataatgaaggatacaccgaaatggccattgcgcgacaagatacccgtcaacaggggacccatgctctgcgcggtagtcttcacaacattcaccgcgcccatgatagcagtgcgatttttcgccggcagagccgcggcaaggaatgcggagcgaggcgccacatccatattctgggagcaggctcgcagaaccaagaaggtcagtgccaggggcaggctagatgggacggagatgagagccaggcagattgccgacggcaaatgagtgaataccatggtcttccaaatgttagaagtcgctcagctttcccgagtgaagaatatcttacttttacattaccaattcgtttggcgagggacgaggcaatcagcatggatgctgcggagatgatgtttgtggtgaagaagatagtgccgagttcaccttcaggcagattaaacttgcccctgaagaagtaggtcatccaggacctgagaaattagcatcgtagccgacaagagttgggattacactcacagtgaagccaatccagatgcgaacgagtccactccaaataggatgaagagacggataaccagcgaccacaggtccttctcgatagacgggaacagccacttcttccttgtggccggctcgatatcccgcccgactgcttctaccagcagcggttgggtttcagagatctgctcctgcggctcttctttctggacctcgaccttttcacttaagcccaaagtgaagattaacttaacgacgccaacgccggcatagacgaagaaaataatgcgacaggcgggaatgaattcccatccgtggattgactccagagaattgatgatccaaccacagacaagcattcccatggccgagccagcagttccaatcaaggaataccaagcaaagacatcactcaaaagctcatgaggtgtgagatgagccaaagtggattcctccacggcgcggaacggaccgatttcatttccactaagaaattagctgagataaaaatagaaagagaaaaaagggtcgaaccttggactaatgacacccaagactgcagcggccagtagaacccagaaattcccgaacagcgcgaaaatgactccgctaccagccatgagaattgatccgagcgacaacaccgccttgcgacccatagcatcagcatacagagtgaggaagaagctaatcacaacatctccgatcagcgtgagcgtcataaacaagccaatgcgatcatccgaaattcccatggccgacagatacgatgccagaattaaggtcgagccgccatacgcgaagaggcgcacgaagcgttgggcgcagagaagcttcacgtcgagcgatgaccgccacatagtggttaggcccagctcttcgaggacatggcccatgtaacgcgccggtcgcgattgattctccattgtttgatggttgaaggaagaaagttgaaacaaccacgttttaactccgaatctcggactcggcgttcctgccggagctaagctttcttaggagagagagcctaaaagggctgaagaaatatattaactcttttgaatataaacaaaattattatgtacaaaggatattctcaatcactgctcagtcttgggaggccatttcactcgtcgttccgcccgcacatacaagttggtaggacggatcaactggaacatgggatcatactcgactgccccatcattctctttcgtgaacttgtaccggtataacaacttgggcaagaacactttgacttcctgtaaggcaaagttgaacccaatgcacatgcgcggtccggcagcgaaggggatatacgcagtcttatgacggttcttgacctccgctgtatcccaacgatccgggtcaaaccgtgctgggttagaccagactgctggattgttgtgtatgtggtgaagggcggggatgatgatggattcttcggagagcttgtatccgcctgggagaatcatgtcgactttggctgtgcgcgcaggctggtatgaggggttatgacggcgctgggtttctttgatgaacttgtccaagaatgccagacggtccgtcagatctgcggtcattggggtatcggcgtcgatgtcgttgtcaatcaattcctgtaggagtctctcctgcatgccgggatagctgactaccgaataaagcagccacgatagcaatgagctggtagttgtgaaaccagcgcccgtggctaccactagggcctccatcagactggtcttaggcaatttctcgcccttgttatcggttgcgcgaataatataatctgcctaggcgttagctcaagccttgcaacttctagtcattcaacttaccaatcatgttggaggcctgcaatgcagcatcctgcaacgggagatcttcgatgccattacgagaggcattttgaatagactcgttgaccatctcaataatacgatagcgagcgtcccgtagacgttgcgggtcaccgaaaggcaacttggcgtaccaatcaccacgggcggtcaccttcttgttcagctccaaagactcagcaattcggtagaccagttcgtggggtggtgcatccacggcagagaaatgcttgaagtccataccgagaaccagctttcccacggcctgcgcaccgagcttgagcatatatgggtagacgttccaagcctcgccgcgctcgtctagctcgtcgaacacattgaatgagtcctcgacggttgcttgcatagtgggagcgtagtgacgcactgctttcggacccagggctggcgggaggaacttgtgtgctgcacgccattcaggtgtatcggtgtcacccaaaaacacaccggcctgttggttcttgatcgggtacaaagggtgtgcctcgttgatttttttggtgaagaaatcagattctgcaaaaacaattgcggatagcgcggggtcattggtgtggtagactgtccggcccatgttggtggtttgaatgataggtccatattgttcgaatagacgctggtggtttcccaagtgatcggggtaaatctcgaagaagtttcccacgaatggcagtcccttgggaccgggaatctcccgtactgccttaccatctattgagatggcgatgggcccttcgttggtaaggatctcagagggggtggacaagatcgaatcctctgactgaaatccgatgcctaacttgagagttaggatgataccagaggcgacgcgataaatgcttaccacttggctcaacgatggcaaattgaccagcaataaggtgctgaagttcttcgtagtcgactgttgtctctacctcgattgggcgagctgaggtgatagcctcgcccaacaagtggaaatttttggcaaccatcgtgaaatgggaatgagaataataacgtgttctttctctctggaagggccctcctcacatttataaggatcttattatctgggccatttgaaactgcatagttgactccactattcatgaaagcgcatcccgactcattttcatgtcataatgaagcagatgcatatctctgcgagcctcggttcaaaatatttctcaaattaggatccacagtatcatcagattgcaaaaataggagaatacaacatagcgcggacgttatttcggactcgctgtgccgatggcactggcgcgaaatgtgccgtctcaaacggccccaccgtcaagatagaggttttttttaattatttttcttcaagatgccgaggcattttcaatccctccttgctggtaggctcgttttatgcaaataccggaagtgctaagtgggctattgtgataattccatgttccagtacggagtcctcgtcgtgatattaaattaagactccgtcctttttggtttttgcaaaatcattcattcacaatgtccgttccagaaacaaaagagctcaaggtcgagctgccagagtatacattgaaagatgtggcagcacataacaccaagggtgatacctggatggtgatccacggacaaggtaacttccccttaaataatcaaaaagacggtgctaacattacgacagtctttgacctcacaaaatatctgcatgatcacccaggtggtccagaggttctcctcgaggtagccggtactgatgccacagcagactatgaggatgttgggcattctgaagacgcccgcgagatcatgcagcccttcctggtgggcactttgaaggatgctcatcagtacgtccagcctaagacagtgcgtgtggtctcccaaaaagcacctgaagtggccaattcctcatcgtcgaccatcaaaacgatcgctttcactttgggtggactggccccagtcttttacctcatcagccaaagaaacaatctcacaaagagcctgggagccatctcccacttgatccctcacccactgaagaacctacgactacctcacgggggcttcatcaacggcttcttggccgcttctgctatctccacagtcctgggtgtaatggtagcgcgacaggccagcagattcaccaagatcgactccgggttcatgcggttcccacctcataagaagtcaaagaaggtgcttcgtgtcgatccgcacctggcacgcggcttcctcgacccgcaacattatcaacgcctgcatctcgttgaaaagaccgaactagcaacgaatgtctaccgtttcgtctttgccctgccaaccgccacaggtattttgggtctacccattggccaacacgtctccatcagagccgttgtcgacggagcgagtattactcgctcatacacccctacctctaacaacctcgaccggggccgcattgaactcgtgatcaaatgctatcccgacggtttattgagcgggaagtatctggccggcttgactgtcggcgaagaagtcgaattccgcgggcccaagggctctatgcgttatacgcaaggtctttgtcgcaagatcggcatggtggccggcggcacaggcatcacacccatgttccagcttatccgggcgatttgcgagaatgacaccgacacgacggaggttagtctggtttatgcgaaccgcagcgagtctgacattctcttgcgcgaagagcttgaacgcttcgcgcgccaatacccgaagaacttcaagctgtggtatatgctagactctgcgcccgagggctggacctatggatcgggatacgtggaccaggcagttctggcaaagcagctccctgcgccttcgccggacactaaggtgatgctatgtgggccgcccggaatggtcaatgccactaagaagaatttggttgcgttgggctttacaaagccaggggtggtggggaagatgaccgatcaaatattttgtttctagaaaattgcctaatatagtaatagccgaggtttatagagaattgagtcaagtgttaaattattgatcacaacttacgacccgtccgacggccctgttgccgaatgcgttcgggtgtccgaagagggcaggtctccgagagatcgccgaaactccactcgccgaagtgctgattcccgagacgttgactggctgaatggttgaagcttatcttccaggaaacactccataatactagtataaattatgtacacaagactatgttctccctcccttcacttcgtatcatctgtcttcgttcctttgcgtttgcttcgacgccggtgagatctccggcgcttcttccttggtttctgtttctcccgttctcgaatcatgaagcgaacccttcggcctaatcttccttctcttgtctcgaacccagtcttcaagttcatttctgttgagattctcacaagaggtgagatgttcaacttggtatttttcgagcctgagtatcgaggaagatcagacgatatagtaaccgtcttctttttcttcgacagttgatcgtcagtaggaggatctggaggtgtagggtcttccgtatcaggtagaactttggcggttcgctttgtcgatgcccgggactgcaaacgacatagataaagatagtataagagcagtagaaagactgtagcgccgaggatagaccccgctattgcacctttgctttcatctgacagtccattgcttttggtcgagtttatttgctcgggcgcaggagttgctgctatattgaccacctcgatgacagtcgtgaatggagtggtcaccgtcaatgtcaccaggttcgacgttggccatgacttggtgttccccagagtaatgactgacacgaaagtggtgtctgcttcgattactgtctgggtgacctcgcgaatcgcaggcgccattgcccggcaacaaattgaactgacatgatgggtttaagtgtcagtgacagcatcacttatttcgcgccacaaacacgtagggtatgcacgagcgggtcaaaacggtcttctagtatatgtgataacgaaatcgaattcgtgataatcgtatcttctgactcagttatgcagcttgtgctgcgcagtcacggaaatatcactgcaattggtggaatggtctgcaagtgtggttggaaggccagctcactgcgtcttggcgcaggaattctgctgagcacggaattaagacgaacacctgcgtggggttttcccaactaatacttacagtttatttgccaagtgctgaacacccacgggttctcgtcagacagacatgcagctttacctcgaatcaatttcctgcccgaaaagaacgagcgcagtgtatggtcgcctcgcccgcacggacgaattctctccatactccacacagagaggccttggctcttcaactttgaactcatattattgaagttacgtgatataaagcctctatagatttacagcttcgcgcttccaggagcaaagttcgatccagcgccctggctaatagcatcaacgatggcatcgacactatccaaaatccacgtattcccctcatcgctagccaaccagcgcgcagcctcttccccctcgacatcagtcgcccacgagccatcctcgatcgccttgcgcaacccaaacaagtgcgaggtgacttggggtgcaacgccagactgagcgcgcaagcacgagacagcaacaacagacgtcaggatccgcccaacggacgcgccagtgctacgctcaggatcagacaacagggcgccgtagttgttgtacaggatgtgcaccggcagatcggggtgtgagtcagctagtttattgaatagcttcttctcgaatggccgatagatggaattccagagcgcaaggccgcgctcgctgatcgcggtgatattctccggggtggggatgcgggtgggggtgcgggagagctggctggtgactgaatctggaaggctggctttcaaggcgttgaggcagtttatggtgcgtgggataccgttgaaactaatgcattttagaccgacctcgcgcatgagctcggccgtctcgacttgcttgttcgggttggtgctggctagttcgtagagggctgcgagggactcaggggagttcatggttatcgttgctgcagtctggcatttgttagattgcgttcaatcttaattgaatgaatcgactcactgatagtgcgacccatgatggctgcgagagctgtttggattgtgcggtctgttggatcttttggtagaccgaggttatgtttgctggcgcaggaatggtggatggccgggcagcaggggccttgattaatgccttgaggctaggtgaaagtttagacatttcggatgatgagctcttgtgctctgaatgtggatgtcttgccattaaatacaggatttgctaaagaccaattgtgttcccgacctcgggagcttcgggaacggaacccagaagtgagcaccgataaataccgggagggtggtaataagacagtaaattacttaaacatttcggtaatattacaggtggggaacacgtcgaaatccggggaatacggggaaacaaaacatccagacgcgatcttatggaagctctgtcattggtgaggatctgcgggctggtgaggaggtcggactcagaaatgcccaccgaagtgtctctctctgactgtttctgggctatttctttccattattttcctattttctccccatcctacgctgcggacagtacaggagaataatatcattcgtactccaagcaacaatccaagtcgccatggaccaacccaagtccacagtatcagagctggaagaggcgaagtcaggtcccctcgaccgacattacgaccttgaacatcaacagaagttgacacggagggtattgtggaagttggatatacagtcagttcaagcattacaattaccatgcgcttgctaaattttccagtattcttcctatcctagccctgcttttcctcatgtcatttttagacaggaccaatgtcggtaatgcgaagattctcggcttggaagcggacctttctatcacagaccatcagtatgatatcggcctggctgtgttctatctcacctatatttgcaggtgcgttgtgttctgttggacccccacgtcagaggctaattgatataaagcgaactgccgagtaatctagtactcaaaaaagcatcgccgaagatttggctgccgttcctgacggctatttggggtatcattaccatgtgcctaggatttgtacagaattttgctggttttgtcgtcgttcgggctttgctgggtatcgcggagggaggtcttctccctggcatggtatgtttccaatgttgaatgaaattgacatagttaactaacaaaaggaaaggttttatatctatcttctttctatcgacgaggcgatttggctctgcggatcggcttgttctacacagctgcttccctgtcgggcgcatttggaggtaaatattcatcaatctcactggttttcggcgatagtaacgaactaggacttctcgctcgtggactagccgaaatcggtcctcgaggaggcatacaaggttggcgctggattttgattatcgagggacttttggtatgtgaaggtaattgctatcaaaaacaaaatgctgtctgactgttgattagacgtttgtctccggggtgtcgagtttcttcgttcttccaaatagcttggaatctgcatcttttttaactgcagaggaaaaggaattcggaggtaaaaggctaatgcttgataatcccgggtcactagaagggtaagcttttctgacccgttggatgggaaagcttggctaacctaaacagatcctcggaggcagaatcgttcagatggtccgaagtccgtcgaggtgtgctagatctacaagtgtggctctctgcctcggcgtactttgccattctctctgggctatactcctttggcttgtttgtatgacttccctatttttacatcggcctcaagcactgacggttttagctgccaacaattatcaaaaacctcggttttgccaaagatgccaacgaggttcagttgtggtctgtgataccttatgctgtcgcagccgtaattacaggtttgtctacagagcacctttgaatttcatcaaatactcacacagtttttcagtcgttgtcgccatcatctctgatcgtctccgtctgcgaggcgtggtgatgctcttcaccctcccaatcgccatcattggatatgcagccatcgccaacattaactcccctcgcgttcaatacggcatgaccttcctcatggcaactggccaatacgctagtgtgccgtgcatcttggtgtggttgtcgaacaactctgcgggacattacaaaagagccactacatcggcgctgcagctggcaattgcaaatgctggaggattcgtttcgagtaagttgcccacactgaatttatttctagatcactgacatcactatagctttcaactatccatctagagatggacccctcttccaccgtggacataccattatccttggtttgttggtgtttgcatggtttatgtgggtgtatttatcattattgggtcaagggcgatcgctgatttacataggatcctgtttaatgtgctctactgtgcaaagatcaatcgagacaaaaggcagggtaagtatgatcaatacgcagggtataatgatgatcgtaacccggagttcatgatggttctatgatggcaatgttgtctatagacatattgatgtgctctacaatatactgattctggttctgggtaattgtagcaagcttaatttttagaattcaacgcattattctgcataaatcatctcatacccaccactgccaccagtgatgaggcttccagtcctgcttagttgcaccacgcaaatcatctgtatttaacacgtccacaccctcatgcacaagtacattccaaacatgattccgcagtccaatgggccaggtgggagttccccagtaccgcaccttcagtcccaacttgtgagcttcaaatacttggctccgaagaatagcaagctggatatctgacagacgactaagagaaagaggcccgataaccttgcggaagtctgctgatgcataatagctgttggatgggttataggtagagtccattggtttgttgtcgtttgccgttatctcggtgggaaaggtcaagttgccaagaggtgcatcaaagaagacgtcgcggtaggttgtgttctccaacagtaggtgaaaaggcacatctccactggcaacgatagtaactgggccgtatacgatatcagagccattgaagtgagtcagatagcccttttcacgaaacgggttcagctgctcaacaagaagcggcaaggtgcgatcaccatcggttttgcaatcaaccagcaaggtcacagtctgctttgggtcattaggaaacaccccgactatttcctgattcatgacgtgcggccagcttcgggaaggcggtgcattgtgtgtgtcgagtatcttcaacagcgggtcaagatagaggctctgtagtgtgccccggtggactgtggaacgtgaatggccgactagaatgtcatttccccatggccagacgtcagcctcgacgctgatacagcctgcacgaagtgctgagcgtaggggaatgtggcgccagtaatcgttgtgcgagtggcatggtacagggatgacaccgttggtagaccagtcggaaaaccttgagtggcgttccccggggaaaatagccaacgaggtgtcatgtcgaaagagataaaaaacccattgccatgcaacgatgaagagattgatgataccgctgcagtgagacattgttagcaccaacaagcacaacgagtcaggtgtggggaacacaatccaacggccaacaaatcacgacggggtgtagacttgggcagcaggtacgcacaagacgaaaatcagtgcccagagaggtcgctgcactacgcgacagaaaatggctctcttagagcgtggatatgcaatgcattctgggtgcgagcatttcaaaatcgagaaagagggtcgtctgggcttcatgtagggcgatgtatttctcacttcgagatcgactaagataaatgcttcatgctccggaataggctctagagcagatggatcaaaggccatgttgggagggaaagaaaaaggacaagctttttccaagggctgggcaccggctaagcttattttatgaggcttatcgggtccaccccaaaatacgtctgcctaattatggtgggattgtataacttcgaaattaagcgaaggaataaatgaaggatgtacaggctatttataggagacacgagaaaagaacgctctttgtctcatatcatgctcggtgtcggagtgactttattccatgatctcaagtgtatcggcaacggtgaacttggcatccgtcttgctttgtacttcttccacctcaacacccggagcaagctccgtcagtgtgagttctccggtggcccggttcacctggaagacacactgtacttttgtcagttttggttggcaatcaatcagggtcgtcgcacttaccaggtttgtaatgatggtgctaacaaccttggcaccagtcaacggcagagtgcacttttgtacaatcttagacgttccatctttagcgacatggctcgtggcaaccacgatcttggtcttgtccgggttcgagatcaaatccattgctcctcccatacccttgaatatcttgccgggaatcatatagttggccaggtcgccattggcactcacttgcagcgcaccaagaatagacacatctacatggcctccgcgaatcatgccgaaggactcggcgctgtcgaatgtggcggctccaggaaccaaggtaacggtctctttaccggcattgataatatcgctggtctgagttagggaaagttcaggtcatcacatctgggaacaacttacggatccagtgtttcctccgtgggataatcaccctgaatattgttagaacggcctacgtaaaaaagacgtagaaactcaccattcccaagataccattctccgactggatccagaccttcacgtcctttggcaagaacgatggtgccaacgtgggaataccaacgcccagattcacgtagaatcccggtttaagctccttagccgcccgacgagcaatcagttctctctgaagctgagccgcacttttagtaggcccagctacagagggctcctggcgcaacttcttgttttcaatgtgcttgtcgtccgtggcaggaacgatccgatccacgtagatacccggtaggtccacgtcattagcatcaatagcgccaactgggacgatgttctcggcctccacaatagtcaatgttgcggctttggccatgatagggccaaatgctttggtagtatatctaatcaatgttagtatccaattctaggacacagactggtacataaacttaccggaacacgcagttaccagcctcgtccaccttccaggctctgagaatagctacatctccggtcaaggcttcttccatgagatatgtcttgccgttgaactctcgggtctcgcgcgccttgccagactccagaactttaccagactcatccatgcgaacggggatttttccctcctgaataaaagtgtcttctcttatcagcgacgaatatcaagaaacataagagaagctatacatacgggctccagtcggggtatagaaagccggaatgccagcacccccagcacgaagacgttcagccaaagtaccctgtggacagagctcaatagccgtgtgtcccgtcaagtacttcttctccaacgccttattgttcccgaggtatgaaaggatcagacggttgatctggccattcttcgagagtatcgaaaggcctcccgccgcggaaccggcattgttagaaatggccgtcagggagtgcaattgatcagcaccccgacggtgcatagcattgatgatggtttctacactgcatatcagcttcgtagttctcacgcaggttatttattcatccacataccagcgactccgcaaagaccgaacccagagctaaggatcgtcgatccactcttgatatcggcaacggcggcatcggcatctttgtatagctttgagcggctgcgatcgatcttaggtgcgagagttgctgatggtgtggttagggagtatctagtggtgctggtactgaatggctgcagggggcgcacgctggcgcggacaccaatgaacagtcgcggtcgacacgcagtgagcgctttacgcgacaaagtagtagatatcctaagagccgacatagcttgtgattgtttagatctaaagaaagaagaaagaaggcaaaaatgaaatcatcgcgttgttatatcatcgacggcattggtcggggctacttctagatgccgagcgcctccgaaggttccccgtgtgtattatctatgacgtcatgggtatccactaaacatcaatatcaacagacccttaatcggcccactacttcttgaacagcctcagcttcccctaaatacccgcacgttgccgacattactctgctctgtcaaagaacccgcattggaaaccattgtagagatgggcgcgacatggccttcctcaggcctctcaggtttagacttaagctcttttgattcgtttgtgaggtttgcgcgtttcaactgtaatgtttatgccaattgatcacagtagggattgtgtataaaaaatcgtatggttgaagatgtgactccttcatacttgtgagagaggacgatgatgttggccaaaatggccctcaaggatgatatgctaaacgaaagggtatcaagatatatattgaagccgataataagaatacgttcagaaaaccaatgtctgatcagatcaaggcaagagaaactactgaagattgaaatccgcattggcagagtcgagccaatcccaattaagcatatcatcaagaggcacatccgggatcgacgcaccaaacgccgtgcccgcccgattgactgcatcgacgatctgatcatcagacatagcagagaattgcaaaggctcgaaccagaggtcctcaggtattgccactggcagcggacgatcatccagacatgcagactgaaatgcctcggatggatggacttcacctagatttcctcgggattggagagggaaggctggtgcgcgccggatcaactcacgcaagaacctcccgtacagcacggaggcgccgcttcggtgacttggtgttgcgccgattctctctaggacgccggctgtctcttcgatgaggtttcggacgcttggtgctagactggatttgctgtcgccgggtgttacgctgagactgagggcggagcaggcggcgaaggagatcattatgacggtgttgtttggcattgatttcaggcgagattcgccctggatggctgctcgtaggacgttcagtgcagatgatagaccggcggctcggaagaaacgtttcacttcgattggagctgttcggtggttgatgacaccaccgtatgtggataattgagtatgcgtgacaagaatctcgacgtaggggggtagagagcgtgcttgaatggttaataatgagtcaatcaatgtctggtatatgcttactgtctccttccccaattgacaaggcccatgttgcataccaccgctcgtagaaagtttgaatggttttcttgatcctgtgatatggtcagtatataaatgatattcatcaagacataatatcatacgactgagcagcctccgagccggtatcaacgatgcgataattatcacagcttgatttaacattctggaatagtccatcctgaaatcgttagaatggaattaatagcctgatacgggcatctctgatggattttgagactcgggagggcacctacaaggtcccttcgaagaactgccacggaactcataggaccgtcacgcgggtctgcaatgttggaaaggtgccaacgatcgcagttttcgatgagcgttgttgaagggaccgtatagcttcggccacgcgcaagacaaacactgaacaagttagtgtcagactcaaatgcaccactaggggaaaacgtaccctctctcaacgacatacaacgcaatccaagctctttcccgtcttcgcaacagcctaacgccccattccgaggacgggtcaatatcatgaaatccatccatgtgtaaagccctcttagcgtcgatgcactctgctcgcgccaggcgattcataagttcttggtcaaagcttgaagatggcgagataatcttgttcaaagataagtcaagagcaacagtgagggccatggcaatataggagcaagtatcatcgtctcctagtctatcgcctggagacatccatggaacgttcaccatgaaagccagaacaatctcaacagatttatagcgttgtgtgatcactcgcttcgcaagccatttgcaatgccttgataacctcttagataaagcagacgcagacggcaaaaatagggctgcgcctgccattatcgaagtaaatagaaaagccgactgggaccgcacaaaggatggggtatgtatcaagggatcgaggccccatcgagtatgtgcgagatgttgatagaagcttggtttgtcagttatcatttagatatgtttaacaataaagaccagactacttacaacgagaataaggactccgactcatcaaatgtgaccaagcccaacccaataggatccatatcaggtccaacatctagattcgctcccgcgggaacaaaaaaggatttggcggcctgttctccctgggaagtgttctgatataatgacgggccctctgacaacggcagtggagatactggcgcacgccgcgtcccaactggcgaaatctgaagatttgaagctctagcaagcagctgcagaggattttccgcatcatccagagtaagaccatcttccgcttgaatatcacgcggagacgtcatgcgcgggcgatctgatgtctctgaaaagcgacgctcatgctcatgctcattttgcattaactggccccgggcttgaccaaggagatcctggaggaccgaaatggctctttgggcctcatcgtcactagcagagtcgaccttcggccgcttaattgcctgttcgatctgatgtatcgctttctccaggccttttcgtttgctaagctccagtcagtattatattatactccacaaccttacgtgactcgactcacttttttacccccttttgtcgacccagatgatggttgggcacaatacactccgcattggtttgcttacatttcccgcagctggactcgcctgcctggcggttgcagcggatcttgctccgtcggcagtttaagcatgcggcttgttttccatgttggctagaggttggacctgccgactcgagctccatgaataagtgttttgactgaagtcatggacactaagggagatgcgggaagtcggggacaattagcgatcagtggttttggctcatgtagcgtaatagggctgcctattccctatatgacagtgtcatatacagttatgcttctcaacgggctgcaggatgcgctaagaccgccacctgcatgtctatattctaccaaagaccttgtttccgtccatggagcactgtttcgctgctctcttcaacagcccggccgggctagctcaatcggtagagcgtaagactcttaatcttaaggctgcgggttcgacccccgcgttcggctattcctaaaaccaaacctgagatttcttttttgctcttttctttttggaatttgttgatggaagagcacattgatcggatcaattgatctttttaatttggtgcgaatcattttcgcttttagctgctcactgcgtagtgtacaacggtgactatatatgtctacaacgttatgtctttcccaattcaattatatgtatatctatagtgacatttatcgatattcactgggtcattaggcgagttatggctcgagatgatatcctgatttctgcaatggctatgtatgaatgtcataacaagtgggtggtatcaattaaagattagtagctaaatataagctcgaaaacaagaccgttggtatttccatgacttaaaacgacagtgcatatagatccgaatcaacataacaaacgatcacatatcatccaaatgaagcctagtgaacgggaccagcctccacatcatggcccggaagagcaccagaagcctccggagcagcatgaggctgagctggagcctgagccatctccggaccagcagcgggcgcaacttccgtcgacgcagctcgcgacggcgcactagtaccggggggagtaacatccaacaaccgcggacccgactcatcaggcctcttgctcgccttgaccgttgcaggagccggacccaagacagtcgggtacttgaagcggaaaccccaagcgaagaacaagcgcatcttcgtccagaaactcatagcatcccacctcttcttaaggatcacggcatcctctttgctgcgggcgcggtagcccttccggaaacaaaacagacagaaaagggaaagcgggagcagaatgaaagaccagaaaagagggaagccccggcgggtctgccagcccgtcatgagacgacggaagcgcacccaggcctcgatcatgcccaagatgaagacgatgccgatccagcccagtgcgcagatcaggacgattgcgaggtaggagatgccgatgccggatccccatgtgctggtgaaccagttgtagtcgtcgtagtcgtagtcgtagtagccagatgatccgccgctgtagccggtggttcctggtccgctggacaggccggtgtagtatccggagttgccgctgtagtcgctgctgtcggtgtactggcatttgctacctatgtatcgcgaggtaggggcattgtaggagctcagagagctcagggttgggctggggatctgggtgggttccacgaatactatttcgtagatgtaggtggtggtctggaatggctgggcgctgtcgactgaggtcgaggttattacattgtccctgggtagcaaggcggcgatctcatagggcggggtgacggcggcagcggtcgtgatggtccattgggtggagcaggctgtcggggctgagaatgtcaggttgacctggtagatggtgctgtgatagtttccgtcactatccacggtgtcgtagccggcgtcgaaaccaagcgccgtgccatagccggtgggatacagcttttcgacaacggtgtagtcataaatggtatcagtggaggtaatggtggacagggcctcagctggcaaagttgcagttggagtgatttcatggacctcagtgaccacctcggaatagtaatctgtagtaacgtcttgctcgtagacctccgtcacaatccaaggggcagcctgaacgcaactcaaaacgaatgacaagaaaagaataaacgagtgtgaaggcgccatcttgagtggtcctggggctttgcagggaaaacagtcacaaacgagggatccatggctttaataaaaaaaaaacgttaatagcgcctctgaaagaccctgaattttctggtcatttgggggcgctgttgtcgcctaagctatactggttgaaagcctcgggtggaaattgccagctttagagtaggcagatgccccgatgtgattggcgatgttcctcaattgccagagcgaagtggaggttctagtctgtttacgctctagtccctggaccctagccttttcgcctcacggactggtctttttttggacttttgtcccaaggttagcatggaaagcacacaaaatcggactagcccatgcatgaaaaaaaaaatcttcgttgaatacaaacagcgcagaaaatacaagcgtaacttcgtggatcgtcagtgttgcaaagtccagagatcgcgaggaaatctatataggggattgacagtcccgtaaatccggaggtacccaggaggaaaaagaaagcagaactgatttgctcaattagcagcccgtaaagcccgtagcctggcacccaaaccatcctcggcctcggcatccacctgcttaggctccttaacctcctccttaggcgcagcatccgcctcgaggttcaagcgcatatcaacacccgcatcatcagccagctgttccataagtcgatccacatcggcctcgccctccgcaccgtattcctgcatcgatataccctgtgcgacatcctcgatcgcactactcgcgatcttgaagtcctccgaccgggcgaggaagttgttagcgtgcgagacgaggtgttcgaggttgacgctccgcgaggcggcgtctaggccccgcgacgccatagcgagcgtgcgggatgtgtcgcgcgtgctctgggcggccttgagttcattgatgatgacatcggcgcgtgcggcttcggatttgagcgttacttggcgtcgcttctcgcgcacggcggaggcggcgtggatgcgggcgatctggaactcgcggtttttcatcgccttgtcggctttggccttttcggatttgaaggtcgcctcggcccggacggcttctttctttagtcggttggagtgtagctggggaagattagttggtttcatgcatgggcggggtcatgcacggtgtgaggggaacagaggaggcaacttaccttgacatttgtgcgggcttcgaagatagggtctttgcgaaccatgatgtcggttatagataatatagaggatgaggataggtgttgtggaaggcagatggatttgggggcgcgtggcaacgtcactgaccgcattcagtgtattcttagcgtcggaggtcgagtattcttagcgcaagcctcctagactgattaaatcaaggctactttcccgattgaggataattactatctacgttcgaaagattgcaagatgagccagtcgattttgcattataaaaactattatacaggccaaaaatggaaccctcagcgctgtttgcccatgagcaaagacgaaagagctttgctcgcgctggaactccgaaaactccgtgtacctcgatgcatctttccattactgcgttgccgactaaatttcattgtgtttccccgctgctgccgtttagacaggctgagactatcgattgcccaggccatggttaataacgactcccaactcggtcgagcctcggaggcgccagccgaccaggtctgtcgggagaaagtctcactaaccgctagctgcaatgctctgcccgtcgcatctcgaagcggacgcgccaaggctgggctgcaagctagtagtctggtgagaagtctcatccgaaagaccggtcggttggacaccttcgaggacgacagactcggggtcgaaatcaaccatagaatcaaagggaaatgctgatagatctccgccgtcgagaacgtcaaaggcgaacccgtcttcagggaaagaaggatttggctcagcgggtgaatcaccgtggaacaggcggcggaagtcatcgtcagaaagaggagctgcaacatcatgtgcagtttgaggttcggagaggtcgaagaggggaagggcgcttccagatccttcgaggccagcgacggacactgcaggtcacacaacaccgctgcaggatgttgtgtcacgtcggaggcctcagccagagtggaaggtgtgaaggtgggggagtagtcggtgacggatggagtggggaaaggaatccgttccatagggagttcgtcgccttcttgtttgaagagggtaggcgtgagggtaggagattcgatggccggggagctggctttgggagtcacgctgcgagatccacggacctcggcggagagcttagccacttgttggctcaagcggttgttctccgactccatctgcgatagacgctggatcaagaactggttctgttgctccatgcggatcttttcggtctccagcttctccatttcgaggcgcttgcgctcgcgagatgtttgagcagcagcacggtttcgaaggacccgttctatccgacgctgctccttctcatcatctgttttggcgcgttttctaaagagtcagttgggttcacatttacgcaggggtggacaacatacctgggagggagattggttttgggggttgggagttcttgtccccaagactttctcttctttgttggcttcttctcatcatcttcttccttaatgtcatcttccggctccggagagtctaatgatgtatccgcgggagaaactgtgtacatctcgggacatggggaggttgggagggtatccattgggttgatagtatccgccatggtgacagagtcaaatggataaccggtgccggacgtgaataataattgcagtacagagtagacagacgtatagtgacttgggtgaaaagaggaagttcagatcacaaaggccacgttattatcacgatcggcaccggagaccagactccgggaatagggttgagtcagagggtgagtcagcaaagagagaggaaagaatggaaaggacagctgttcaactgcaaacggaggggagcgatgaggtttaagtagaggccagcgtggtctgaaagggatgggctgggggcgatggcaacaaagggggggggaaccttggaacctggccaacacacgtatgtaggtacaagcgacaccatacattttcgcatgtgcgcccaagtacctccaaaggggcggagtttctgtgacgagacacgtaaattacgttcatttccccctgcattccatggttcggccccggacgacagccaatcatgatgtgccgtgttgaaacattgcgtttacggaactccgtatggagaacccgacggggcctccgtacacttggtgacttcaatgctgtctatctcacttctatatttgggttgcatacacttgctacggagtaatattgatgtactccgtattatgtacttcggattcatctcctgtcgggtaatacaacacacatccagtccctccgactcgatctatctgaatcatgatacgtctgtcccacaatactccgtacgaatgatcccatatcacacagtctcgaacaatctagggtggacctatggatacgctctcctgaatctgaagacgcgatcaggattgccggagaatgccccatccccacgccaatcacaggtctttcgcagatcaaggctgtccccgccccgttaattctccgtcccccctgattgagaatgtgactctatgattatgtaaatccatggataaggggccaatgccatctagattggcggaaatcagcaggcggatgctacggaacaatctggaacacggcagaacgtctacaaggtatgtcgagggctgaaacgggcatacactgcccctccgttactatttagggttggcctcggaagtcagttataggggtaaccgtggaacctgaccatttgcaaactgaaaagataacgatatattctaaatactccgtacactaaattcagtgatcggtgttgtcatcccattttggaaaccttcgacaccaggggaattatatgcagtccctcaaacaaaaaaacgccatcccatagaaacgtgctcatgacaatatcgtaagcgaacatgtgcccgggtaaagtatctacatggacatatccatcgtgtcgtcgccggcatcgagagcattctgcgcatctgggtcggggaccaccacaccacgtccgcggccagcaagcagttcacgtcgcacttcaggtccaatgtccttgtgtccacggacgagaagcaaatcgagaagcgcttcacgctggtcctcggtgatgtcgttacgataacgctgtgcaaagaccagaagggactggtgccagagaacgggcagccggtatgccttggaaccgacctcattcatggcatcggccgaaggatcgagggcgcggaagcgcatgaagtggaagaccagcgcgtcaatgaccttgtacggcagggcgtacttcttctctaggaagacgcggatgaacatgttgacagcaccggtgctttcaatggaagtcaacgactgttccgcggccagatcacacatgcggagcagggcggcggccgagtgtagcacgggaaccgagacgcgggcaatcacagaagagacaatgtgggcttcacgcagggtgcaagtgccggtggacacgagcgggaacagaagtcccttgaagaagcatgcgggcttgtacagggccttgcgcagcgcattgtaggtgtggatgttcaatttcttggtttcgtggatttcttcgcgcacgcgctccaaaagcacagtgttgataaactcctgggcaactgcaggcttggacgaaatgaaaatacgggttacagcgtagacggcgttaccggtccatgactctgggcgggtgatatccagaagggtctgccagttcggtacagaaggaaggatcttgatgggcttggggagcgggccagacttgtagcgagaaagaatcataccaaccctagaacaagttagcttggcctcacaaggaatgatcacaaaacatacttctcatatacttccacggccttggcaggaatctggactgcatcctcggggacaccaccaccttggatgtattgaccatagggaccctcgccagcctgctttgcctcgtgctcggcaatcttctcgagaatcaaatcggcgagattagtggggccagcggagctgggatccttggggtgaaatatagggtcctcctcgtggggcatgaatctgttgaacatatctagatcattgggatcgacctcctagtaagatgttagaagctatagtactattcaaggtttcggaagtcttacaacttgctcgacatcgtcatcgacccaatcgtcggcctcaaacttcccctcgtcgtcggagaaaggctcttcctcgtcctcgaaccgggtatcgaattcgaatgcactcgactggggccgtgctgagttcttgagttgttcggcagcatcttcatcggccaattcctgtccaatctgtagaatcttgcgcgacatcttcgcatcgacaaagcgctgtccattttcgccatcctcgtcgttttcgtcggctttgcctttgcctttgcctttcttgctgctctgtgtccgaaggtgccccgcggaagtaatatcttcagcaagagggttgtgtctgcgtgccgctgccgcggcacgggagctcgatacctttggcatggctggtaattcttcagataaaccaaaaacttaaaatgagtattttgggctggcttatcgaagtacacacgacgatcaaattgtgtggtcatatttttttttctgccaggcggtgccccccaatctcctctccgcctgtaccccacaccgcctgagcctctacattttctgcaattaatcactgaccgccctagtttcccaaggagattattgtctggtgcgcatgcgcttgactgtttttgtacacaaagagaagcttgctgtctatcaatgaatataggagtcatcagaatactataggacttcaatctgggaagctacagattaccaactcccttgatctttcggatatatacgccgaaacagtttaacagcatacggacaagcttccggttgagtaaggacctcttagctttgcgaagcaaacgccgtggagccatcctcattgattatagctggtcaaattgctgactctccccagaccgacagaccacaacccaagcggacaaacatagcctccgtcatggcatccggccaagccccagggtcttccgctccgtcgtccaacatcaactccccgattctaccccccaatggcggacccctgcttaatgcgcaatttaccgacctgaatccacgatcatctccagccccatccgcccaaggcgatggtcgagccaagcgcaacaagcgagacagccgcaagaaacgtgaagccaaaggattagaccccgagaacgcacctccaccaaaaaggcgagccacagccgcacccagtacagccttgcccagctcaaaactgagcattcttcgtccattgctgctcgccgagccgcacgactcggatcggtaccctccacagcctcgccagttgaatcgcgtgagccgaaagacatcgaacgttttgggtcagagctgggatttctacgaggttgtcgataaacttaccaacaagaatgggtttcgttatagctacgccattgcagaccccggattccctcatatcaaatatcgacagacggatgttcacccgtaccatacccgcttcagtttcgaggattcaccggctgccatatttttttctgagaacgcgactgcggtgaccaccagtgatgcgtggcatactgcccgcgctaatgtatgtgctcgagagggcacgtattactacgaagctcgtgtgattagtggcatagtcaatgatccccaggcacctcagaacggcagaccgacaacttcaccgcgtggccatgtccgtattggattcgcccgacgtgaggccgatcttgacgtgaatgttggggtggattgctacgggtatgggattcgagatgtgaacggcgaagttgtcaatcgcatgcgatgcgagttcttcttccccaagggggaggccatcaatgaaggcgatgttatcggcatgctcattactcttccacctctttctctccacaagaagattgtcgagggcacttacgatcccaccaataataccccatcaccgccgatggcaaccaacatcatccgagatcggattccttttcactacaaatcggatttctgttggcagcaatctaacgtcttctctacaaaacacctccgtgactatgctttcaacctcaaagaaacaccgacgttcggtcccccgtcccctctgaacagcgaagacgccacgctccgcaccctcccagggtccagtatcaccattctaaagaacggagtacaaatgggcactcccttcaaagaactttacgccttcctaccgcccgcaagccgtctcgccaacggcacaaacaatctcggtattggcgagcgcgagaatgccgacgacggcctgatcgggtattatcccgctgttagttgctacggcggcggtgccgtcgaatgccgattcgaggggccgtggtgggttggtccacccaagcagactgaaactggagagcccgtccgtgctatgggcgaacgcttcaatgatcaaatcgccgaggacgtgatggccgatatcgtggacgaggtagaagccatgttcacgtggggcggcattgatggcgatgtcatcaagaacaacaccgagctcgacggcgctggggttgtgggaggggcggaggtgttgaagggtggtgttggtgcggcgcttgactctgcacttgcccatacccccggaactgccggggcatctgattccgctgctaatagcaatcgtgagacgccggctgcaggcgatgttgggagtcatggccttgaagatgcgatgagtgtcgggacagctggcactcctaatgttgaagtgcagggtgatggtgatggcgatgtcgagatgacttagtgacgcactaaatgggaaaatggattaggcgtttggcttttgcaatagcattgataccaattctgatttcaaaatctattcacataatatacatttcatatagtagtcgtacagcgctgggcttaatctaacttccttccctccaacaactctccgactttcatgaccaactgatcgtctccgtattgaccgatgacttggattcctgctagttcggtatcattctgcccagaaacagtcacggggactgaaattgcaggtagaccagccagactggcgggaacggtgaatacgtcgctgacatatgcatccaaaggtgacttcttgatagatttgctcatcaaatccgacagtcgtggaggggatgagggcgcagtcggacatacgatgacatctacgtcaatttcacctgcgattttatttgcatcctgtgcagcgagcggatgcttggctgtaaagaccgcatcaaagtcttgctggactagacgacgcaactgttgtgctttgatgaagtagttatcaatggcatcagcactcaaagtgaatgtgcctaggagaattcgtctcttcacttcttccccgaatccctctcctcgagtctttgagaaaagacatccatcaggctttccgtcaccatctgggccttcggcacgagtcccgtatcgtactccgtcgtatttggccaggtttgaagatgcctcggcaggtcctacgacataatacgtggataatgcgtgttttgtggcgggtagggagacggaatggagggtgtgcccttggcttttcaggtgtgctagagaaagagcccacgcccgtcgaaccgaggaagtcagctcggaaacgttatactctattggcacgccgattcggagaggggctgaagtcaagcgcgaggcaagctgtggtgtttgaagagaggcctggattcgagagcgggagtgtattgagaggctggtagggtcgcactggtcatgttggttgaggatgtctaggcatggtattagcagtcgttttccagtcacactggtcaaacccaccgaagatatctcgcacattggcggttgttttccccaatatacccacggtatctagagaattggcgtatgccaccactccccatcgtgagatcagtccgtatgacggtttaaatcccactatcccggtataagcagctggaagtctgaccgagcctccggtatccgttcctagtgagctgtaaaagtcagcaatcagtctgcttgctgattactagccacttacgcatagcattcgtcgccggcaactgaagcggcacttccaccagagctgccgccggccgataggtcctccccgctggagtcctgacgagggttcctgacaggaccgaaatgtgaattgatcgagtgtgatcccatcccaaactcgtccatatttgtctttccagctacaatggccccggcggcctctaattgatcgacaacggtggcattgaacgggctcacatattcatccaggattcccgaagcgcaggtcgtcggaagatcgcgcgtgcagatattgtctttgatggagatcaagcggccatccactgcggacttgggtttccctggtcatatccgttaattctgaagtagagtgtgggagtctgatgttgctaccttcttccttgcgcacatctgcttcctttacacggtccagccatggcccctcgcgcaacagcggggttatgaaggcatttaaaccacgtgtgtattggttagcgacgcatctttcagcttcgcgcaataaggacatttagacgattgtgggaggagtataacacagaaagggagtgggaacgtgaatttcccgggtccgtgctgcttttctatggtacctgtccgggtctctgtccccctagaagatatgtgtctacgtacatgtaggtatatattataaacttcatagtccggttagaaatagatacatagctattgctcaaatgtaaacatcgatatcacaattttgacctcggagctacaatgtcaacaacaagtttcttcgggccgagcatgaccgaccaagacgtcatccggatttgctcacctctctcctccttcactacctcacctaccagctatgttctcaagaagtatactacagacggccaaccgaagtgctcgccaggcctcagctcgagctgtaccgcaggtgctcggccaagctccattcggtcggcgatacatttcggtctatggctacacacaggcaaaggctctcatctactccaaatatggcgagcccaaagatgtcttgcggttagtccaagtcctcagctgcagttgagccagaaagctgattaatgtcaatctagcctacacaagcactcaatctccgcgccgcacgcaacccaagtgaatctgcgcttgttggccgcgccgatgaacccagccgacgtgaaccagattcagggtgtctaccccagcaagcctcccttccaaacggcgctcggaaatgcagagcccgccgcagttggcggaaacgagggcgcattcgaggtactgtcaaccggcgcgggtgtcaagaacctcagcaaaggcgactgggttattatgaagcgcacaggtcagggtacctggcgtacccacgcgcagatggaagaatcccagttgatcaagatcgaaaacaaggagggcctgaccccgctgcaggttggcactatcagcgtcaaccccgtcactgcgtaccgtatgctccgtgatttctgcgaatgggattggatgcgtgccggcgaggagtgggtgatccagaacggtgccaacagcggcgttggccgcgcagctattcagctgggccgcgagtggggaatcaagacgctcaatgtcattcgcgagcgcaagacacctgaagagaccgaggccctcaagaaggagctcctggaactgggagctaccgttgttatcacggaggaggagatgcttactggcaatttccgggatatggtcaaggagttcactcgccagggtcgggagcccattcgtctggcgttgaactgcgtaggcggaaagaatgctacctcgctggcaaagactttggctcctgattcgcacatggtgacctacggcgccatgtcgaagcaacctgttgcattgccctcgggactgctgatctttaagaacctcacgtttgacggattctgggtcagcaagtggggcgacaagaaccccgagctgaaggagaacaccatcaatgatgtgcttcaattgattcgctctggcaagttcaaggatactcctgtggatgaggtcaagtggagctgggagtctgagggtccagagttggcagagagcgtgcaaggcactttgggcggctaccgtagtggaaagggtgtctttaccttcagcggcggtgattgagtgaacagccacctggactatatgaatgtattataaagctacgtggtattttcccgatatttacttgacagttgattgatataacatgggtccagaaactaggaataattgtaacagaactgctagaaagtatacttatcaacactcccagttcttcttcacccagtcaagaatcaggtttgttagagacacatgtggcatgtacgcatcactttcctttgcaatatcgacatcaagaccagcaaacttagcagccagtatcacatatttctcgataaaatcaaggtagaccaaatccaccgtctttggtgtctcggatgcattgggagatacgagagcacgaatacagtttggcactcggtagaaggagatgggtgaatggatggtatcatcaccgtctgtgcctgcatcatcttgtgtcgtgtacccgggcacgagatccggaccggacagggggatctgctcgctagccgacggccattgttgggcaataacatcttccgggtatgcaagttgctcgggaggggccaacgttgtcggtgaagattcgtccgtagtttcgtatagaacttgaggctgctcgttcaaaacatcgacaataagttgtgccttatcatatgggacatctttcacgtagcggaaggtgctagtgaatggagatacaataaaagtcgagtcttgggtaaagggccctttgaagatatcgaacctcatagcgcccgtattaacaatggctagcctaggtatgtctccacgagactcatccttcaagtcacgcaaaacctcagtttcaagccaggtgtagatgctgttggggtccgggtacttggttcgtgacatccataaatcatgtggggcacatccgtggacttggtccagatgaaggtcggtccgtgctttggcgatcatccgggagacattgagacctttttcggttgggaaggtctctcgatcaagaccggtgtgatgataataagaaaaaagattgttgtctatgtatctgcgcttgaagacaggcccagcagcagactgacggcttgtcttgctggcgaggccatcgattgacatgaaaccaacagtttccatgaatcgaccgctcgctagcccaaaggccttggaatcatactgtgcatagtcacgcacatgctggtgcccgccgaagaattggattggagtatcccaacgaattccccggatctccttgaagatcgcccggtattccggcgaatgaacaggcacatggccgatcaccaaaaacagatccacttctttatcccgaatggcttcttggaaccagtcctccttgatggtagaagatactttctggaccacagtattgttgtaatttccattgaaatcaaagaggaagccaaaggctactatacggatgccttgattcttggtagtgaacttcttaaaccgcggggctagaggcacaagttgttttgtggtcgggtgaatgatatcgatattcgaagcgagatagttgccccggaaatttggaacggttatgagaagctctgcctccgatgtgttcttctggtatagttcgtggtttcccgacgtcaacaggtcgatgtgctggtgccggacaatgtctgaaaggtagatacccttgggcttggacgagtcatataggccgttcccttccactcggtcaccagtatctataacgagtagatcttgtccttgtgcttctgccttttcccgcatgtgtgttgtaaacgatacatagtctccccagtctgcggagtaggacggcctgcgattattagtacaactcggagctcagcagggtccaaggcctactcctgcagatgaccagccagccagccatgagtatcggtagtatgaatgaaattcagttgcccgaaatcaagtggtcgcagcggagcggagatggggtcgggtgcggagggttgagcggcgagcgccgtcggaagtagccagagcaaggacaacatcattaccaacaatacacccttgaaagagtgtctaggagcatggatttaaagcaagaaaaaagatgcaagatgttgaaagatcgtaaaagaagctgaagggagcacgtccaacaagatagcccacagaagatatgtggtgtaaacaagatgcgagctctctccaattcttgtatggttacagttacagtaccggtgagcagctttgatatcacgtgtcgcccaacatcttcggatttgcagctcaaagattatttggacagcgataagtttcccttaggcatttacttcgattcattcgtccgttcctccattcaattgcttttgcggtccgatttggtctgcgatcttgaattgaatccatttgtctttgtttttcatcttctcaattccatcatatctccacaatggcagctccacgacttttccgcccaacagctcgtctgttctcatcgcgccttgcttccactgctctgcgctcgaatatccgccagtctgcctgtgctccttcaatcctgcgccgcggatatgccactgagaccggcaccaaggaggtcaccgttcgcgatgctttgaacgaggccttggcagaggagttggaacgcgaaaagaagtgctacattatcggtgaggaagtcgcacagtacaacggcgcgtgagtaatcctctaagcttcatttgaatcgaaactgacgttgaacttcctgtacagatacaaggtgacgaggggcctgctcgatcgcttcggtcctaagcgggttatcgatactcccatcacagaggccggcttctgtggtatcgccgtcggttctgctcttgctggcctccaccctgttgtgagtatttatgaaaattacggttgatcgaggatcgcatactaatcgttcatgatctagtgcgagttcatgaccttcaacttcgccatgcaggccatcgatcagattatcaactccggtgctagaactcactacatgtccggtggtattcagccttgcaacatcactttccgcggtcccaacggtttcgccgccggtgtcgctgcccagcactcccaggatttctccggctggtacggcagcattcccggtttgaaggttgtctccccttggagctccgaggatgccaagggtctgctgaaggctgctattcgcgaccctaaccccgttgttgttctggagaacgagtaagattccattccatcttgccagatttcgtgtaaactaaccaatgctaggctcttgtacggccagcatttccctatgagcgaggctgcccagaagaacgacttcgtcattcccatcggtaaggccaagattgagcgccccggaaaggaccttaccatcgtctgcatatctcgctgcgtcggtctgtctttggacgccgccgccgagctcaaggagaagtacggcgtcgacgctgaagttatcaacctgcgctccattaagcctctcgatgttgagaccatcattgcctccctcaagaagaccggccgcatcctggccgtcgagtctggctaccctatgtacggtctttcttccgagatcctggctcagtgcatggagtacggcttcgattatctgactgcccctgccgtccgtgtcaccggtgctgaggttcctactccttatgccgctggtcttgaggccatggccttcccccaggtggacactattgttggccaggccgtcaagcttctgcgcttgtaagccaatgaacgagggcgagtgagaagctcgcaataatatagctatgtgcctagtaccctttcatctgttccatcttatgtcgttgttttattctgcctttgttatccaatcgtttagacagtcttttggaaagcatgtaccattacatccagatcaggaccatcgtaaatgtgcttaaatgtggcttagatggaaattcattgctgccagtaatttaaaacaaaggacctacccttaaacgccagtgtgtatttgatatttcattcgaatcgcaagccattcccgtcatcacgacatcgatcagaccttttgggcaacacacccagcaaaacagtccgttggccgccgagggtcataatagccttctgggccatattcctcgtcatcactttcaacatcaccatgttcactcttttgtctttctttatctgcgggagcatcggtttgaggtttcgggctaatattctcgtcgtcgtctcctagaacgttcttcttcttgactggggctgtggaggccgccgttcccttgacagcggagaatgagcttttgaaacctcccttcttgaaaccagtacctcctccacttggtaccacattggccacaggagtctcgatgactttcagaccggcctgcgcatcggctttacgttctgcccgacggttcttctcgagggcatttggatcccgtgttagctgtttgaggtcttgcaaacgctttctgtgcagatgatcgtatgagccaatatgtgcctcgtattccgggtggcgcgagtaagatttgttgcagaggctgcaggtgaaggagctgagcgcagaccgcgctgattcagtctgtaatggttagcttggcgatagcgaatgtggctgaccaggatggttaattaccctcggagcgggatttgtgaaaccacgctatgtttgttagctgaggtatcggatttggaccacaaaggaagagcataccggtgccattgttcttgaactagagtttaggtgaagttgagtgagagagcgtttagtacggccgggcattgcgaccatgtgtgtattaataacgggtctaacgcgtcgctgcctgtgaaaccaggcaatctatatttaatgtctaggctttcatcctcgtgcactcttttgaagagttatctagctaattagactggctctatttattgagaaatccttctacctatacccaatatctaactctttatagtaaatcaagtaagtcgaactatagtgacattgtagtataggagtcacctgacttgtggatactgctcaggacaaatcgtcattacccgccgaggaactggcctatcacagctgccgtattttagcaactcagcgatctttaaaccccaacatttccctgctttttcttagttcgcctatactactttgtacaaatatggatgcatgattgacgacttatttccttacgagttccattttcacacttttcctccagctcccgagcaccaaaaatcccgataaccatacaatgccgtcccacctgctctccaaaccggacgacatcgacaccaggtctatgatctccctgcaagaattagacccatcacctgtccatgatgtcctggatattgaaagcggcgaattcttccctagggccacctctccgacgcaacatacagctggtatttcaatgccaaaactaggcctgagcggccatagctgggattcatggcgtacgtcgagtgacaaaatgctggatcatatattctaactacgatgaccgcttagtgactggtatccaaaaatactcaacctatccacctacggctttcttcatcctacatctcgcgaacacctctcttataccactcgttactcgctccgtgcccgcgagcgaatcctatcttttgctcacacgacccgtataccaagcacccggactagagcatctcgtcttaacacttcctataattgcgcatattgcctccggaattgctctccgcaacattcgtgctgcgcgtagagcacgtctgtacggcgccgagactcgcgcccagcgaagcacgttatatttctggccgcggatgtcattgcaagcacgcactggatactttatcgtgccgctggttgcattccatgcactcgtcaaccgtgttacaccattgatcgtcgaaggaggaagctctggcgtaggacttggatatattgcccatgggtttactcggaatcctatgttctggaatgtcttttatttcttttttgtgaccgccagtgcgtggcactttgttggtggctgggcgacctggatgggctggagagtgaccacagcgcgcaaggagcgtagtcacaaaggctcgttggatggctaccgtggacccacggaaacaaagtcgaagaggcagcgcaagatgtggtgggttgtcaatggaattgccgcggctggcgcggctctttggcttgcaggttctctcggtattgttggacgtgctggcgaaggtgctggttgggaggccaaggggtggaatgagatgtatagtcaggtcccgatcgttgggaagtggctgtgacagctttgcatgattgtacattatgtatctatatagacttaaacctaatatatatgaggagtctgaatacaaccttacatacatgtacttttatagttgatataaattacaaaacaggtattgttgtgtactgcagactggtccgtgcatagaatctttttctccgtcgcattcaacgtcttttgcgacatgctgtgaaaggcttcgcccatgaacgcctcgttgatttttggatcagcaacgagaaggggtaagcgaatactcattcctaccattattctcgcccaatccccccgcccgacccccacttcgatccgatattgtgtccgattcctttccacttctagagccatggaggttcctcagacccagctggtggaataccagggagacaattatcatgttgtcaaggaaggtttggcgaagattctcaatccgcctgcccaagcggccgcttccaagggaacgaagaaggatctcaaagacgacgatcaagcgcagtccgtcttctacaacccaattcaacaatttaatcgcgatctcagtgtgctagccattcgcgctcacggcgaacatataattgacctgaagaaacaaaaagcggcccaaaagctgaagaagcaggcaggcaatggggataagaaacgaaagcgtgaagataaccagaccgagaacccaagacccgcctcaaaagcagaaaacaaggaaaccatagagacaaacgaccaaccagtcccagctgccttagtccccgctcccgcggttgatcaaggacctcagtcagaagctcaaccagagcaacccgcttctttcactgttcttgatgctctgtctgcaactggactgcgcgctcttcgctatgcctcggagcttccatttgtcacaaaggtcgtggctaatgacctatcagagtcagcaatcaaatccatgaagaaaaacattgattacaacaatcttcaaacgattaaacccaatctggccgatgctcgagtttacatgtatgggcttgaccacgcgagcaagttcgacgtcattgatttggatccatatggcacagcagctccattcctggatgctgcagtgcaagcagccaaagatggtggtcttttgtgtgttacctgcactgatgccggtgtctgggcctcgaccggctattcggaaaaagcattctctctgtacggtggtatccccatcaagggcctccactcccacgaaggtggtttgcgattgatcttgaactctattgctatgtccgcagctaagtacggaatggccatcgagccattgttgtctctatctatcgacttttacgctcgtgtctttgttcggatccatcgatcacccgcacaggtcaaattcctctcgggcaacacgatgctcgtatacaattgcgacgtcggctgtggcgcatggtcaacacagcccattgggtctaccaaatctagattggaccgcaaaggaaaccccatataccaccacggcctggctaaagggcccacagctggacctaactgcgagcattgcggcacaaaaacacatcttgcaggacccatgtggggcggtccgctacacaatcccgactttatccaaaagattttggacatgcttcctggagctgatccagaaacatatcagacctgtcctcggattgagggaatgttgaccactgcccttgaagaggacctggacttaacaccatctgattcccaaccatccactccaaaacagcctgcgccaagcacgaagaaccagcatgactctgcataccctgccatcattcctcgaatggacgttgccgctcgggaaaaataccctttctacttctcactcagcgctctctcaaaggttatccactcaaccaccattcctatcgacgagttccgcggtgccctcagtcacctcggatatcgttccactcgtagccacaccaagccgaactcagtccgcacggatgcgccctgggaggtgatttgggagatcatgcgcgagtgggtccgtcagagagcacctatcaaggaagcctccctgaagcctggaacccccggtgctgcaattatgggcaagagccgtgaaaacctgcgtaaattgaacgatgaagaccaatggctatcgcttctcaaaaaagatctgatgtctgccgtcgaggccggcagagatgtcagtgacttggtcactaaggtcgaagcggctctctaccggtccggatcgcgaaactcgtcccagcgtactgctgcttctgcggagactcgtcccaatgccgatccccagcctgtacccgaaaaggaaaagtcacctgcacagcccttcaagcggcctcaccctagtacccttgaggtggtatttgatgaggctctaggtcgtgaggtgtctgctgcgcataccaagaaacgactcgtgcggtatcagctcaatcctcgtgctaattggggtcctctcaaccgggcagggcgttaacgatattcactacatgtagttatacttagaaaagtcctctgtatggtttatactttgtcgaacaaacctatacctatttaacatcgtagagtgacaagcccagcatgtctactccgcgctattattcccattcctggtactttcaatgagtcatggccataatggttggaatgccccattcgcccaatttcgcccaatactttattgttggggccaccaagtgcttagtcacaattcaactagaatgtaacgttaactaggcaacgagaatgtaaggaactatataccaactacatatatgtttctttcattggtatcgtgaaacgcttctggagcagatacatcttctttctatgaaaatggctgtcggcggctgtttctgcggcaaagtccgcgtcgaatacaacggccaacccctgacaacagttagtacaataggattccctttcgtttagtataaccaagctaatctgttgcaggcactgtgccactgtctcgattgtcgcaaacttaccggggccctctacacgtacaatttcgtcgtcaaaaccgcagagttgaacatcactggaagtccaaaagcagtgccaaaaacatcggatagcggaaatgatatcaagaattatttctgtcctgattgtggtttgtatcttactgaatttaggaacgacagtatctgacgaaagtgataggcacgccgctttatggacacaagataaagcccaatggagaggctgaggaggttacgatcgtccgggcagggatctttgatgatacggagattttggatgaagggaggcctgcggtggaaatatacactgagagtcgattgaagtggctgagtcctgtcgagggggctgggcaatttattggcatgttgtctgtaccttcacttgatgatgcttgacggcggaaagcagaaggagatttctattgtagaatgtcgtgtggactgctgttgcatgtcgaaggtgtggtagatttcatcttcgtattataaaatatgaacactattctaggaagtgattcgaaaactactgtattaaaatgcaagttgaaactcatatacatgcacataaaaactccaagccttttgcgacatatcacataatgacccatgaaacaaaaaaaggtctatcaaaaacacaacattataaagaggatatcaacaggaatagatcatttcggaacattttcgctgccctcttcgtacttctcccagttcgccaaaatagaggcaatgcgaggcgagttggtgagcctgtagacgtcctcgaagtattccttggtgatctcgaagggacgggcagtgacgttggggatgtacttgccgatcaacttgctggggtcgatggtggtcttgttgatcttcttcagcaagaaagaacggaagggcttcacaccagagcgcaagaaggtactgtggaatggcacatcgatacccttgagaggaatggtggcgaaaccacgctccaggttgatgggacgcggtttggcctcagtttgcttgacacattcttggatgatgctgaccaggtggtccttgacgtcctccaaagacatgctctccataagagcggggatgtcgatgttctgcgccttcaggaagttcagcaggttggtgaggcagtcaagagcacggaggtcaccagccgcgacgtattgcatgttggcaacgttgtagttgacaatctcgagcaaccagccagtggtctcggagatgttctcaacaacgtactgcagtgcctgctcgttgaaagtcttggagatacggctggggttgacagcgcacatggagtagttggaacgaccctgtgcatcacgctcgaccgcgacttgcatagtcagaccgcggtagaacacgacagacaccaagctctcaatgggcatgacatcagccagggcggccaaagccgagtattcaccaagcgagtgaccagcgaagctgctgtcgcgttgcaccaatcccttggtgcgcatgtcctcgaagctggccttctccatcagagtcaaggctggctgagtgaactgggtggcagagagaagaccggtgggagaccggtaggtgtacgaagcggtattctcatcgacctccttgaagatcttctcggacttgatggatccgtctgcgttcaccgactcgaaggtcatggccatgtagttctcccgaatagccttaccccgtgggccaccgaagtagactgtcagctccttggggttgttcttgacgatgtcaataatggaaagaccgtagttctccatgaagtgacgatcagcccggtcccagacctcctgggcaactgggctagagccatacagctccatacccatgccctgctcctgagagccctggccagtgaagacgtaggaagtgactggctgctcgacctctgcctcaccctccatgaccttctcttctgtctccttgttgctggcctcaaccttgatgatcttgcgaccagcaatcatgccgacatgctgcagcttgacagtgatgatgtcgttgggcagaaccatgccgaccagcgagacttggaaaccacgaacgcggccaatgttgttctcagcggcccaggtctcgaccaggctgcgaacggcggcactgctgtacatgccgtgggtgatggttccaggcaagttggcatagctagagaagacacgcgacacgtggatggggttgtagtcaccagacacgcgggcatatgtctcgttggaggcgggggcacgcagttctagagcggtcttgccactgagcgggatggggttttcaaagtagactggctgttcaatggaagttccgttacgctggaggtagtcaatcacggggttaccgtgtgagtcacctgcctcgtattcgacagacgcaacttggatgatctccttggtgggaagctcgagaagaacctgcccaacggtttggacgttgctgaagacagtggtgttcttgaaacggatcaagctctgcaagcggaacgtcagggtctggcccagaagctcaacgtcagagtcgtccatgcggaaccattccttggagcggaggatggcgacatcccggctggttgcgaggtgaacctgaatgggaacctcatccttgcgctggaaggtgttctcatagtccacgtaagaaccccggtacaggaactgactggtgacatgcataatgggtttgttgtcgcgtctgatggtgccgcaaacctcgaccatcttaccagaatcctggttgatgatggagttaatctgagccgtggtgtccagaacatcaccaacctttaggggctgggcgccgggcaccatcttgaacccgttggacaagtgaacaagcttcagcaaatctccatcaatggtgcgggggaagataggcttggtgattgcctgccagcctgccacaatagcaaagtccataggggcaaagacctccttgccaggacggtcaacgaaagcctcactggtgttgccaactgcgtgaacaaagtcggcaacatcttgggcagtgatggttttctggccaccactaaaggtggcagtagtaggggtgtcgaagggaacgtccttgttgccgaaccagatccggtagtagaactccttgatgcgatcgttgcggtcacccataacctcacgaataggggcgtatccagtctcggggtgataagtgaacaagaagttcagagggacaacgccattctcggcggtgcggccctcgatcagggtcagcatgatttgccccttctcgttgatcttggcctcgaccgtcttgaccaacttgccagactggtacggctcccgcacactaatgacagtcttcgcaggatcattggggttggagatctccacatacatgcctgccgtgggagcgacaatccgcttcatggggttagactggaagcggtggccctgaacgaagacatcggccaagaacaaagcatgtctccaagagtagacattgccggcaagaagaccgagccagcggtccaagtctggcaaggctgcagtggaagacaagcggaaactggtcttgcttggctcttccgaaataaccaaatcgtcagactccaattcggtggtgtttgtgagctgcccaccgaagtactcaatgacaggaatcttggtgctgtcgccgccgtagacatcgcgcaagaggccagcgatgtggccctggtgaacaccatcaaggatatccttgacgggctcatcaatgatgttggagaagcgagcagccacaggaccctgaagaatacaggttcggccgacatcttggtcgacaacagcctcaagatcctcactctgccacagagaatccttcttgaagaagaactcaaagttctcatccagcacggggacgaaaggcacgggcttctggccgcgcttctggcagagcagcaggaagtgctgcacatcttgtgcgttgatcagctgattggcagcttcgggataagcagacaaaatattgtcgacggtagggtagggggtatcaagatcggaataactttgaagcagcgacgcctggccttcggcagtagtgaaacgctcctcgacacggcggatgaagtcacccgtcaagcgcttgagcgaggcatcgatccatcgcgactcgtgcttgatgtacatgaggtccaccatgcggtgaacgacctcagcataagtcatatcttccagatccacagtctcgcctgcggcgttgcgaccgaaccagaccttgtggaagtcatcattcagcttcttgatgatgtagttccgttgcttcttcagctcaggcacacgcttggccttgtcaagcttgaagatcttctggtccatctcctgccagaacagcacaccgcgagtggccagcttgtggataggctcacccatttcagacagaacggtgatcacaccacctgttgatttctggtaggtcttttcccactccgcatcgtccacaccaggagcatcagcaattgccttcttggcattgtgagaggtgtgtgcctctttggcgatcatcatgcgagatccgaagagacagccgtcgaagggcataggagggtagccgaacttggcggaccacgtaccggagaggtaaggataagtgtcttgcgaaccaccgaagccactgccggcaacaagcacaatgttgtcttgcttgcgaatccggctgtacatctgaagcataggctggtggaagtcctcgaaggagtggtgaccaccgccacggccaccagtccactgaaggatgatggggaacttagggttggctttggcaacattgatgacttgctgaatcgcatcgacggagccaggcttgaaggcaatgtgcttgataccaagggtttcaatatattcattggcaacttcaatagatggcacaccagcgccaatggtcagaccttcaatgggcacgccctccgcgcgcaaccggccgatcaacggaatctgccaggccatcgcacgcgggttgacgtagatcaagttaatagtgataccacgtccaggggggatagccttctcaatcttggtaatggcctccgtcatcgtcttcgcgttgtagtagccaccaccagccagctcgatgtgataaccggcgttcatagtagcagccacaaagtcccaggcaacggtggtgggtgtcataccagccaccatgacaggggggattcccaacagtcggctcatcttggtgtccacgtaggtttgaccagtagatgtctttgtcaagcgagggccgtgttccttgacccagtccacagcatacttgacggaatgctcatcacggtcaaacagttcgggcttgtagccgacttccgcattggttccgtccatttcaccggcgaggatgacccgaacaccggtaccgtccttgtttctgttggtcaaaacgcccagaccagagatgccaccggggccgaaatcaaggatgtgggttgcatgggggaagacagtggctttctcccagttgaccgcatcgtgggtgatcatgcgaaccaatgcgggcacaatgtccttgtcgccgagttgccgcagatcctctccagtcttggtgtggaagacggggatctccagtgacttggcggagatctcaacaacatcttccagatcctcgagaatgcggtcgtacgcagaaacaaggtactggctgtggaaaggagcagtgatagggaggaaacggttgacaaagcgaaccttgcgctgtgtgaatggcacgcgattctggtcaagtccggtgggagccttgaccttacgcaggcgaacattgagaccgtagagcgaaataggaggaccagtcaccacaaagttgcgcgcactgttcactagggaaatggaaatgtggcggtcctcgggcaaatgttggttggtggcatcgatgtgctcctgaacggcggcgagcgagaggtcgcggatagacagcatgggagtaggcgttccctcgccattctcaaccgagtcctgaagaacggacggggcgatagaggtgcgggggtaggcctgctgactgcgcagaccaatccagaatagcatggtcagggcattgcgggcggctgtggcgaaggactcccagctggttgcagttgcaatggcggcggctgtgacgactccctgggagtgacctgtcgtaccgaggaagcggcccaggatatcaccaggctggcggcccaggactttgcaggtaaccatatagtgggacaactggaccaaaccaatcaatggcaaactcacgggcgcggacacgagataatcgatatcaggctgtgcatcccggtcttgcagccattgcaagatatccatgcccttgggatagagcttgctagcctcgggctcgtgcgagagcgtctggagcaattcggcggaggacgtaatcaattcttcgacgaaagaagggtacgtggtgtaaatgttgcgcaattcatcaaagtactcctcgatattgccttgaccaccgaacacagagtagatacccgcggcctcgtcggatgccgcacggaacaaggccgaatcgtagggcttggtgggccggcccgccgcagctcgcccggcgtagtaggcctccacgacttggttcttcttagcaacaatgccggggagcgcagctgccactgcgtgaacatcattgccgcgcatgaaggcacgttcaaattcattcaacgcgagtttcagaacttccaagtagttgccctgtgcatcgtcttcgtcctcgatctcgtgagccacatggccaatgtagcgggctactaactccgtcactgatgatggctcatcgtcttgggccaattcgtctgtgggctcgggtaacgaagcagtaaagctgtctttcaactgcgaggcgtggaaatgaagcgaggtaggaacgaggaaagagaactcgagggacccatgggagagggtgagtgggcggagggattgcgaggatcgaggagtgttgataccggtttggggaccggtcaatgtgccgtacatgatgtggctctctctctctgaaagggaatagaaggagattaagcggaaaataccagagggaccctaaaagcgaagaggggtttcctgtgttctgttagattccgaggacacaacacacacacgatctcggctgcactcactggaagacctgagttctaaaggtctgaagtgaaagggggggtattatcaagggaataaagagaagtagagggacacaatttcaacagatatacacataaaataagaaaagaggtccagagcacgattgagcctgaaggggaaagaaaaaaaaggtctggttgaactgcagacaattcaaaagggtttagcgtgggagaagacccgccccaatgggttctgacttgggttgaacccgttgggacgcagtacactgtgataccggtattgtcatggagcatggcaatgatgttttttaattgattttgaattgatttttgaattgttttgtggtttttttcacttcttttgatatttgcatatgacatatttaaagcagcatcgaaatattactctagttcccacctatctcgtagactccattcgtaatggccgttgggattcttcttgaacaacgtatgttgtacaagctagtctgtcccctgacccaagctagctctaaatgatccacgcaaatcgttgcttagtgtcagatccttcggccgaagctttgaaaccccaacgccctcaccaatttggaccaaattgaccgtgtccctccccattcttccgaatcgcgtcgtcaaatgacttggcaatttggtgggatcatcagcattattactcttctcattgcctgatatcattttcccagttctctcgctgtctccaaggtgggtggttcctcgttttcccgttattttcattgataaaactgcgaaaattaccgtccggtattcgttgataccgcatctatcgccgcgctccatttcctttcccaccttttttttcccttcttctttctggatcaatccaattgtcttggggactttcactgatcacttcatacataggattgactcctattctaattctctcctattactctcttctagtcgtcctacccactccttcctctctccgcttgggcattctacgacaactcttgtcgcgcccaaccccggacacttttgtcctaatttcgtccttctgtttaatcaattgatacccatcacatctatcatgcgtccggaagttgaacaagagctcgctcacaccttgttggtggagctgctcgcctaccaattcgcctcccccgtccgatggattgagacccaagatgtcatcctcgccgaacagcgcaccgagcgcattgtcgagattggtcccgcagatacccttggaggaatggcccgccggacactagcctccaagtacgaggcctacgatgcggccacttcagtccagcgccagattctctgctataataaggatgccaacgagatctactatgatgtcgagcccgtggaggaagaaccagaggctgctgcagagcccgcttcctcggccccagcagctgccgctcccgctgctggagctcctccgccaccccccagtgcaggccctgcggcctcagtggaagatgccccggtcacagcagtcgatattgtgcggacgctggttgctcagaagctaaagaaaagccttgcggatgtgccattgtcaaaagccattaaggatcttgttggaggtaagtgcagcctagtccccttcaaaaaaaaaaaaagttggtctggtctaacaccgtaaacaggcaagtccacattacaaaatgaaatcctaggtgacctgggtaaggaattcggttccacacccgaaaagccagaggacgttcccctcgatgagttgggtgcctcgatgcaagccacattcaacggacaacttggaaaacagtcttcctcgctcatcgccagaatggtctcctccaaaatgcccggtggcttcaacatcactgctgttagaaaatacctggagactcgatggggtctgggatccggccgccaggatggtgtgctcctgctcgccctcactatggagcctcctgctcgtcttgcatcggagacggatgctaaggcctatatcgacggtgtaaccaacaagtatgctaccaacgccggagttaacctttcggctccggttgctggtggtgacggtggaggtggcggtggtggcatggtcatggaccctgcagccctcgatgcccttaccaaggatcagcgagctctgttcaaacagcagcttgagatcattgcccgctacctgaagatggaccttcgtggtggtgaaaaggcctatgtgacatctcaagagaaccagcaagtgctgcaggctcagttggacttgtggcaagtagagcacggcgacttctacgccacgggcattgagccatcgttcaacccgctgaaggcccgtgtctacgactcttcctggaactgggctcgccaagatgccttgagcatgtattacgatatcatctttggtcgcctgcaggtggtagaccgcgaaattgtcagccagtgtatccgtatcatgaaccgctccaaccccctcctcctcgatttcatgcagtaccacattgacaactgcccaactgagcgcggagagacataccagctggccaaggaacttggacagcagctcattgagaactgtcgcgaagtgttggaggtggctccagtttacaaggacgtcgctgtgcctactggcccccaaacaaccatcgatgcccgtggcaacattggctacaaggaagctcctcgcaccagcgctcgcaagcttgagcattacgtcaagcacatggctgagggaggtccgatctccgagtacagcaaccgcaccaaggtccagaatgacctgaagagtgtttacaagctgattcgcaagcaacaccgtctctccaagtcgtcccagatccagtttgatgcactgtacaaggacgtcgttcacgctctcggcatgaacgagagccaaatcattccccaggagaacggccactccaagaagggcggccgcagtgctgccaaacgcgttactgccacccgccctggcaaaatggagactattccattcctgcacctgaagaagaagaccgaccacggttgggactacaacaagaggctgactggtgtctatctgaatgttttggagtcggctgccaagaacggtctcagcttccagggcaagaacgttctaatgaccggtgctggtgccggttccattggtgccgaggtcctccaaggtttgatcagcggtggtgctcaggtcgttgttaccaccagtcgcttctcgcgcgaggtaaccgagtactaccaggccatgtacacccgttacggtgcccgtggttcccagcttgtggtcgtgccgttcaaccaaggtagcaagcaagatgttgaggccctggttgactatatctatgacaccaagaagggtcttggctgggacttggactttatcgttcccttcgctgccatccccgagaatggccgtgagatcgactctatcgattccaagtctgagcttgctcaccgtatcatgttgaccaacctgctccgtcttttgggctcagtcaagacccataagcaagctcatggctacgaaacccgccctgctcaagttgtcttgcccctgtcgccaaaccacggcacctttggtaatgatggcctgtactccgagtccaaacttgctttggagactctcttcaaccgttggtactcggagaactggggccactacctcaccatctgcggtgcggttattggctggacacgtggtactggtctgatgagcggcaacaacatggtcgccgaaggtgtcgagaagcttggcgttcgtacattctcccagcaggagatggctttcaaccttcttggactgatgtctccggccatcgtcaacatttgccagctcgacccagtctttgctgatcttaacggtggtctgcaattcattcccgacctgcagagcctgatgaccaagctccgtaccgacatcatggagaccagcgatgtccgccaggccgtcatcaaggagaccgccatcgagcacaaggtcgttaacggcgaagacggtggagttctttacaagaaggttgttgcagagccccgtgccaacatcaagtttgaattccctaagctgcccgactgggagaaggaagtcaagccgctcaatgagtctctcaagggcatggtcaacctggacaaggtggtcgttgtcactggtttcgctgaagtcggtccatatggtaactcccgcacccgatgggagatggaatccaagggcaagttctcattggagggctgtgttgagatggcgtggatcatgggtctgatcaaacaccacaatggtcccctcaagggccaggcctactctgggtgggttgattccaagaccggtgagcccgttgatgataaggatatcaagcccaagtacgagaagcacatcttggagcacactggtatccgtctcatcgagcctgagttgttcaagggatacgatcccaagaagaagcagcttcttcaggaaattgtcatccaggaggacctcgagcctttcgaggcttccaaggagacagctgaagagttcaagcgtgagcacggagacaaggttgagatcttcgagatccccgagtctggagagtacaccgtccgtcttcgcaagggcgccaccatgctcattcccaaggctctacagttcgaccgtcttgtcgccggtcaggtgcccactggttgggacgctagccgctacggtatccctgaggatattatcgagcaggtggatcccgtgaccctctttgttcttgtttgcactgctgagtctatgctttctgccggtatcaccgacccttacgagttctacaagtatgttcacctgtctgaggttggtaactgtattggctctggtattggtggtacccacgctttgcgcggtatgtacaaggatcgcttcatggataagccgttgcaaaaggatatcttgcaggagtctttcattaacactatgtccgcctgggtcaacatgctgctgttgtcctctactggtcctatcaagactcctgtcggtgcttgcgccacggctgttgagtctgtggatattggttatgagaccattgtcgagggcaaggcccgcgtttgcttcgttggtggattcgatgacttccaggaggagggctcttatgagttcgccaacatgaaggccactagcaacgctgaagaggaatttgcccacggtcgcaccccgcaagagatgtctcgccctgctaccaccactcgcgctggcttcatggagtcccagggttgcggtatgcaacttatcatgactgcacagcttgctctcgacatgggtgtgcccatccacggtatcattgctctcaccacgaccgccactgacaagatcggacggtccgttcctgctcctggccagggtgtcctgaccaccgctcgtgagaaccccggcaagttcccgtcccctctattggacatcaagtaccgtcgccgtcaattggatctccgcaagaagcagatcaacgaatggcaagaagccgagcttctctacctccaggaggaggctgatgccatgaaggctcagagcgacgagaccttcaacgaggccgagtacatgcaggaacgtgctcagcacattgagcgcgaagccattcgccagaagaaggatgcccaatacagtctgggtaacaacttctggaagcaggatccccgcattgctcccctccgtggcgccatggctacttggggtctcacagtcgacgacattgacatcgcatccttccacggtacttcgactgttgccaacgacaagaacgagtccgatgtcctctgccaacagatgaagcaccttggacgtaccaagggcaatgcagttatgggtatcttccagaagtacctcactggtcaccccaagggtgccgccggtgcctggatgttcaatggctgcttgcaggtcttggaaagtggtcttgttccgggcaaccgtaacgccgacaacgttgacaaggtcatggaaaagttcgactacattgtctaccccagccgcagcatccagaccgatggtgtcaaggcgttctccgtcacctccttcggtttcggtcagaagggtgctcaggtcattggtatccaccccaagtatctgtttgccactcttgaccaggctcagtacgagacgtacaagaccaaggtcgaggctcgtcagaagaaggcctaccgctacttccacaatggcctgatcaacaacagcatcttcgttgccaagaccaaggctccttacgaggatgatctgcagagcaaggttttcctgaaccccgactaccgcgtgtctgttgacaagaagacctctgagctcaagtattccgccactggtcccgaagccaagaagtctgaaagcactcgccagaccctcgagtctcttgccaaggcaaatgccgccgagaactccaagatcggtgttgatgtcgagcacatcgattccgtcaacattgagaacgagaccttcgttgagcgcaacttcactcagagtgagcaggactactgccgcaaggctccctccccgcagtcctcgtttgcaggccgatggagcgccaaggaagccgtcttcaagtcattgggtgtcagcagcaagggtgctggtgccgctttgaaggatatcgagatcggagttgatgccaacggcgctccagtggtgaacgtaagtgcatgattatcccatgatcccagtgacaaagctaacatatctccagcttcatggtgccgccgccgccgccgccaagcaggccggtgtcaagaatgtcagcgtgagcatcagtcacagtgactcgcaagctgtcgctgttgcggtctcacagttctagagcaccgtgcattttcttttcatgttcgcatatagatcccagagaccaatggttctcttgggttgagacgtaatgattgtgatttatgttttttagattccgaaccagcttcgtctcctggttcgttgtgtttataatgggagtgatgacattttctatgtcttttttctgttgaattttcatttagagcttatagtctcttgattagcgatattatcttttaaaaataacaaagatttctatccgtatacaaattgaagatgtagtcatgactccatagtccgtatctccgcagaccctttctctgtgtacttatatcgcagttcatagcaaccagcttgggagtctggtcctattggcttttattgcgagcagaaaattggccgtacccaacttgaagtattatttaaaaatggaaagagtcatgcaaaataggcgtctttgtacacgtaaaaaccaaatgcatcaagtcagttgcatgttatatatacagctttgtacttttccagtgggcatatcatatcccacgagacaatgtattcttgggtttggtcagtactggggattgtagtaggccatgacgtgcagcttgacaactattggaaggcaccactcgatctcaaacgggcaggaagggactggcaagggactgccccaaggcaagagcgttcctggacttctgcccaaggagggaacgataaaagaagtgagtataaatggaaaggtcaaggcatatattataacccccaaccctcctgcttttcctaggctagctggtgttgaagaacctctggatccttaatttttttcctccttggggatcatttgaagctattcacacttctaacccaccataacccccacccccacccccacaattcgggcaatgggtgtttgtaacacagcccgaaagggaaactgcgatccttttagctaaggttattagttatgcaaccttaaacatgcggaaccacgggtcctcccatcctctaccaatgaaaatcctggcctcaggtctctattcccatttgacattgttcattaactagggattgtatcccattgcttaatttctgtcactgtgtcgaggtatcacaagtggatagggcccgaggctagtaataattttcattggtacatatgtagaggatatcaggtaggcgttcattatggacaactatgaaacaaccaggatagaccgctaacagaagatattcatagttaaagcaatcctagtcacaagatgtttgctggacagtgattggtagatagaaaatagaagtaaaaacatggaaagtattcaacatttaattttgactcggaagtacctttcgcaagcttcagttgcccttccaggggcctggtcgcagcatccgatcctcttttccataaacactgacgtccttgacaatggcaatgaatctccggtggttctccttggattcgccaatacgagggcggaaaaccttcaagaggtcgctgctgaggatgccagatgctgggatggctgcgtggatttcgccagctgtcgggaacgtctggttgccagaaactggagtcgacatacgaaggcctgctgatgttagtttatctcttgcatcaaatatcgattgggaccgaaactcacctctagggccgtcggggctgttggcacggcttccggagagtcgaggcaaaggacttgcgccgcgagacccttgtggagtgccgccacgagaaaccgaagtaggtgggttgagtttcagtttcttgatcttaccaccctcggtcatttcagctccagatccggcagcagtgtcgccatcactgccagatccagcaccaccagcaatgtttcgtacgcgtttcttgccctagagaaatcagtatatatggccaaaggggaattattgtacctacctgcaaagcggatggagagatcggacgcgatgggggttgagacgcagggagatgcatgtttttggccttctttcgagatgtatcggtgccgctcgcgtcggaagcgtttggtgatccaagccttttccgtgatccagcagctgaagctttcttcagggcgtctgtatgcttgggtcgaccggaaggagtatttcctcccttggagagcgcttctttttggttcttttcttcttctgccttcttccgttcttcctccttggcccgttcggtttcgctgtcgtcggagctctatacacattagctttgggtctgctgtagcaaatgagtgaaagcttacctcctcatctgtgtacggattgacgtcagaaccgctgctgtaatcaaagttccgttctctcctcttcagagccttgcgcacacccttgcccaacacacgccgggcctctcgttcacgtttctctcgcatttcttcagcgtcatattccttctcgtccttgagattgaacacattcgccttgagctggtcctctttgatcctcttttccgcatccttggcatcttcatcctcattgaagaggtcatcatgttcttcgtcgtcggcaaatcgatcctcttcgaaatccatttcaccagcttccaatcccgcaccctttccggcggttgtgccctgttttccggcgtagactttgcgctgcttggcgtatgtttccagttccttttcttgctccagctgctgctgcttctccatgaaccatcgggggtctttcactctcttagccatgaatttctctgcttcgtcaatcgtcaaagccttgaaattactcttagcgttaaacttgtaccacttttcggccggtatcattctcatctttccgttgtcgaggacaaagatcgcatgtgtttcggacagggctgcttcgtagtttccaacccaagtgtgctggttatcgaaatcctccagatgccatggcaaggcttcttcgtacttgatccgtgctcgtgcaatttcttcgggggtcatatccgacttgaaaacctgctgcgtcttctgctttggggcatttggtcgtttcgaggttgagccgagggcgggggcgatttgggaaaggttctcagcgcgctctttttcacgtgctgccttgcgagcatcgaaggcttcgcgttccgcttcatccattggctggccatcgatctcggatctccccgaatttggatcatgagttcgtgaacgtgggtcgcggcggtgaagtcggactggtcgcgtaaattgtgattcatcacgtgggtcaacgcttttcttcgaggcaaatcgcgcgatgtggtgcttcagtccctccatcagagctcgctttgtcgtcaccaccgggtaatcaacatatttatcactgagcaaaggaccgctgaatccattcgctgccatgtggttgtttgaaagctcaagcataggtcgctcggacgggaagattgcctggttgtggggcctttgcggtcgtgaaggaagagtcttggtggctactccattgccggcaggagtggcgccagctggtctgggaacaggccttctcttcggtcgaaccaaaggatccgctgcttttggacgacgcatcctcatcagcggtgcaccatttgggccggttggagtgcgagcattcgatggattcgtcggagtcgacatgttgccgacgtacaggacggagtcgtacgagtggtagaaggtgacgcgaaggatcgcactagggtggaaggacagaacaaaggtagccttttacctgttttgtgttgcgacaaggggcggccgacttaaaaaagagtgagagacgctaaagccactttgagagcaccgaccaggaggtatgacggtagacctcggagcaaatgtttacccgtcccgccagattggccacgtgactcggggagatctccgggtcgtgtggtccgtgcattgggaggctcttttaccttaaagatcacctctataactacagcctaactgcgattgagaatagaatccaacggaagcaaagagactaagggtcaaaacaccgtagtcggtctgaactgaagcatctctaagatcctcttgagccagctgtatattcagattatccaagtccttaacttcaaagtcattgagaacagaggcgcatatgcagccgaccattcttgcttttttggtgattgtgattgagtactagatgtagtgtatctgagatttggtataattcactggatttctattgtgaatttctatttccttgttttttaattcatgcaaaatctactgaccgaatcgttgacccggttccagtggtttgtatggacaagcaatccaatcacagcccttgacacaattagtagggaccaaaaacaaccagaagaccaaggacgtacctgtttataaatctccgtcccccaccatttgaaaccatcgacccatcccgggtaaatgaaggcgaagaagacaacgaccactgagaatgccaacccggaatccaatgcggccgacaatgtcattgcatatttttcccaccatgcggtcctccttcgccggatcacataattgaacacaaaacatacaagggcccagatggaaaagttgagcccggttgcaggtgggatccagctcagactgccaaacaagatagggaagttgaccatacgccagaaactcttcttgctgtgtcttcccagaagccacgctccgagaggggcgatggctcctatcaaaaaggcccagacaagcggacggtatagccctcctgggccaaagaagcgctgcgggccaacgactccccagagaatgctgccgttgaaatggactcgagcaatggggcagttgaaaccattgatagcctctggggtgcaaagccccgggacaaaagtgaacatccagttcagcacaccaatttgggtcagactcgagactaaagtcgccatcatctgcacgccaaacagaattcgtggtgggatcttcatgtaatggccgagcttgaggtccgaggaaaatttgatcccttgtgcagagctgatatatgagtaggtcacgaaaatcatgttcgctacaggccttcccgggaatacaataccgcaaaggagttggcagatcagatagaggctgctatgttgattggtgacagccatgatgatacccactgggatgaaaaacacagaagtaataccaagagccaggagtaggccataccaaggtaaatgtgttgggtaacttttgtgcaggttagttgctatcgaaggtcaagggggattgaaaacgtactattccaccgtgaagatggcaatgacaagcatagaaacgaacacaacaagataccacatgaggggagcgtccttatagcgcctcatcaagcgacaatgaacatcttcccctcccaatggaatgtcctggctcgcttcacgtgagctagtccttgggatttcataactctgtcggggagcatcattgcttccacgaaggggctggtacgtctccatgtctggcacttgccgtttttcctcaaaggccttcctagtctgttgccaaatgtccttgccataccagcaaatggtgtgagagacaagggatgtcaaagcagcaaactgaacaccgtaagacagcacgtaggtgattgggagataaactggggagtaatcttgataggccttttcatcaaacaaaaaatccgtggtcaatattcggctcacgttgtatggtcgcccggaattgtcgaacacagctgttgaaactatgggcatatatgcagagaaaagcacatttttataatcttcatttgatcagcagagtcaaattagataagacgggggggccttacaaagtattggggcggctatccagatgacaaccaccagtcccgtgacaatattagctgcagcccaccagggcgtgagtaacggtgagccaatataggcaatctgagcccaatcgaaggtcaagggaaacattccgagaccagaggcaacaccaaactaaagagagttagctatagcagcttaaaaagaggacctgaatgtcttaccaaattcgaaatcaccacatttttgggtgccaaccaagtgatcacattaaaataactcagagcaggcatcaacagtcccgggacaaaataccagagaaaggcccctgcccacacaacgacgaagaacttatatcgggagatactccacccatttgcctttttgttgacagacttgtgcattgtagagaacattgcagtggacatcagggtccccggccagatcatagccgatggccgcacgaggaatcgtcgagttagacccgcgaatgcatatcccaaaacttgagtggaaattatgagcagcagctgatatataattggaacatcctggttgtaaaatttatgttgctcaacaataacctgtcttgggtcagcttcgtcatgagtatttcgttggtctactaacatcagtcgcgaaagcaaacccaaaggaaacattgctgctgatgtaaacgcaagcatgctccttttcgttccaacggccctgggcaaaccaaagtctgactcgagacgccaatggaacaggaggggcctcgatatcaccggagagtgattcccggtggtgaagggttccgttttcaaaaaactcgagcggatcacctgtttgtctgaaaattaaatcccaaaatttgcccagtggatggactagaacaagagcaatgattggtgtaatggcaacactgggatagcgcaaggaaaagaaaagattggcggcagaccccgtcaaagagaataacaacgaaagaatccacattcgaggtgctagagatcattagatataaggagaaaaagcaccagaaagaaagcctactgttaatagaaagagagaaatcatctgtcgccggaacggaagcccgaacttgggcatacggcgaattgtctggaggatcctcatccgaggattttgaatcatcatcatcaatgtcgaggacattttcatcatcacttgtcatatatggtgaagacgccggagtctcctgcatcaccgggttacccggtacagccaatccagtagcgaacgagtatttcgaatcaggacccattcccacatcggacgcggcggaggaaggccgacgatttctctctgcatataagctgtttcgttgtctgacaaaggaatgtgatcgtctcggagtagaccctggtacgttggaagaacttccgatgccatctccgaagctcgcgcggtgtaaccccccacgaactttcggcccacgcgaaacgggtgtgtcctcttctgagccgtccgggtctcgcaatgctccgtaagagggagcgcccaggacgggcgatgaacgaagaagaggggcgcccgacatgaaggcccgaaagcgctgaacaatccctgtgtcggggttcacgccgggtagtggattgtcgatttcggggtagtttccattgtcgctcgcgctatcatcaaaattagaattagtttgatccggtccagcgggaagccactcgcgcctcgaggtcgaggggcaagacagcttccgcgtccgcagtggaatattggccgacgtggtggtggggttatgatgaaatactataagtatttcaggttaggccgtgcattagctcaaaatagatcagggcattgaggaatcagaagagaagaccacagagctagtggaggactagagcgtagtgtggtgaaaaacgacccgttgtccgagctcatgggcttgccccaccgacatcggcagatttatcttccctttcgaacgcaggtaaggttacattcaaggcactaacaacaatagaaagtgttttatagtgttcgcttccatatgtacatttcagtttggtatctaatcattaaaacagttctacaactttttcatcctcgttttgaggcgcctcgatttgaggttgttcgggctccttttcgccttcaccctcaccttcctttgcctcgtctcgcatcaggacttgcactaaccggtcgcatgcctctgtcacattttcatcttcaacgtgcatatgagtttcgcgaatcaatgggtaaaccttgactgctcgcatcttctcccggccgtcccgagttgtggttaggagaagcagggtttcgagatgggttgtgataatggtagggtcgctgtctcgttgcttatcgggcggcaacagttggaggtctggcagcatgtccgccgtatcatcttccgccagctcctctggacctgcaagcgggagcaataagtaaggcaaaaggttggcaccgtcctcgtcaaagagcattggatgcgagtcgatctcaaaagccacattcttgattgtggatgcaacacccttcctccggatatcgcttcggtgctccgtgaagaccgtcagcttggtgatggggaccaccccatcgtactcctggcgttgagtgaaataggccctgccctgttcggtctgggagaggtcggcaaacacgtacgacaggtaatcataattggcgttcttgttgagaccaccctcggcacccttgacgaagcagtccatcacctgatcgatcgcgttctcggaggtagatacggattcggggactttgcgcttgagagcgaatagtttgtttaggttttcggatttgacgaggttggctaaaagcatagccacttcatcggcgttaggctctttgggattctgggatcagacatattagccctgttaccgtctagttatgacagtcgagaaaactcactgtcaatttcgtgagcaattcctcaataaacttgtcatccccggcgaggagtttcaacacttcttcatcgccagacaaattgaccaggatagtcaatgcattcttcgcaatgggctgtaaaaagatatcagtcgaaagtcacccccatgatcgcagataacgcacgtcgtaatcgcggactagaagcatcaaatcgcgaacgggtaggagttgattgcgcttgaacacttcaggctgggtggtggagaagccgacgagggtttcgcaagctatgagctgttagatcatatgttcgtgctgtgtgagaagagttgccatacatatttgtctgattggggtattgccatggtgcaggaattccaccagctataaagagtcgtgagtgagctaatcaatatcgtaggccgtaggcacgcacatcttcgagttcagtcggcatattggagtgtaatgtatgagccagaaagaaggggctgagtatgtggtatcgtcaattccaaaactgtagtctcaaaagattttttttcccgcgcaagtgggggtttctcgacgtcactggaaacgcggagatgcctttcagggctgctatttgtaatacaacacatattcatacatagttatagacaatctgaagagtgtaaaagtgattattcaataataggcaatacacctaatcagtctatatttccaaatatacatgtcgacgttactatattcattcacagaagaggtcggaattgccccgcgatctttagttaaactagccatacctgactaagcacatggtaaaaagcggcgaggccttagcacttaaaacggaaaggcagagcctcaggaggaagtcaccatctccaacatgttgagagttcaattatcagtgaaggttgcgtatgaatttatgctgctcttccgcctaagacttctaactgttgtaaaaatgtcacagtttcctgctttcccttgctagccactaaaatctaggaaactgcatctcttttccttctcgaatttccaggattctttcgaatatccatactattgtaccacagtacgttcctacaaaagccaaccgcccgattcgactgcccttggatggtagaaggcagatacatagagaagagactacaccagccaagcttgccatgccaatatcggaccgtgttggagtttgataattggccaagaggctacccggtcatgaagttagcttttggatgttattatagtggaaagggaaagccaacatacaaacatattgctgagaataatgctgcgaatctgactccgaaagatgttgatattgtccgatgacctgcagagctgtctggctgtgtatcaacaatcgaagccaagccatggcaagcacaggcgtaaaaaaagacaaaggcgccgttggtgtgatcagtctggtgttgcagagctttgtcgctcccagaacaatacccgcttgcccagaaaagccagagaattgctccattagatattgagtccaggattggtatctccttaagccgtatcggtggtgaggagtatgttcaggtgagaaaaagaaatgataaagtgcaaagtaacaatcgaggactttgaactgatgcaggtatggagcacaagacaatgaaagctgtagtagctttggaaacaagtagcacaaattcatgattttctcgagataatactgcaccctctgaaaaatattttgtcttccgaggattctgtatatcggaatcatagtcgtaagcgtcgttgacaccgaaggtcacttgcccaagttagttaagatcaggatcattccgactttggtttcagatcactcctacctaagcataaagggaaagatagagcaagagcaaacagtattgccggtatcgtcgacggaaaatcgccggcatgaagaatacccgaaaaatagagacaaggggcaaccggccaccaaagtgggcggctgaccatgaacaatattcgcatatttttcaaggaagtcgatgtcttgaacatatttgaagaatgatcaaggagtactgggctgtatgctgttgagaaaaggatatgctacgcaaaaatcatatcgtggatagagccagctcttatagattccaatcttgccccgccttaagcgcttctaatatacatcgttttggtgggatacagtattttaaaccacctgcttctactccgtactgcaaaggaagatgccagctcgaaattcacttcctattgatagtctactctagagtacaagggaggcgcacgcgtaatttacgaaatatacgaaatgataacaaagtacctgcatacgaaataaaaggctctttttgctcttttctttgagatagacatacagggatatgaggacagcgctacatgtaaagtcgagtttttgactcgagtcatgcaagactatagccaatacaagcggagttgaaatgcatggcaccataaaagtatgatgaagacccccgggatgattcagctactcctcgtagtgcccaaagggtgacttggaaagtgacctcgggcttgattacaaggattaaatccctgtaagccaccgcgcacgcgcgcgcgagagagagggggactcagcgtaattccgaaacgggccagctgcatggggataagcaccacatggtgctcgtatccagagcgggccgagagcccgttttacccgttacctgcatgccaagatctaagatactctttctgatcctaaccacgataaaggtggcttgcatgcgcattattcgaacctatcacatccatatatctatgttggtggcgggcagtgttggctgtattgtagagtgatactatcatgcaggtatcctaagaatcacgaggtttgactttataagcagccaagcaataagaatttcccgaatcctcgaacatgcttgtactacaatttatctagtcaagctggttagtccggttgagccaataggtgcactccaacatacaggtctgattgggcctgtaatacacgaagcttgagaaaggctgtaacattttgagtctattgaggtgctgggcagacctgcatgaagctgagagttcagccgcataacctcgccctgccataaatctactctttagcttccttcatactcctgtatttgttattttcttggatttgcagtgataatcatatttaatcgaatatgataccccaacgtactcaacctatcagaatagtggtggtagtgatgtactgggagttcgacgtttcccatgaaaggcaagagccttgggacgctattaaggctaaagatgcatgaattggagtatgactggttatgtagccatggcttctttggggtttcatgagagtgatatcttagaccgagtttgccgaggcatcctgcatctcgaaagctcgtttcacaaccccggttctagaaacaattcgcgaactagtccaaagttcgcgatttttggcgaatcgaagcggcatagattcgaagcccgtaatcaagattcgaattcgacccgattcgcaggaaatcgcaaactgcgaacagttcgaaacttcgtgcggagtggtacatcgagaggagcggaaaaagttggaacttaaagctcagccagtctttgccgtctagtacgcgccattgtatccaaaatctctatctctgctgccaagcgcgttttgttgttcagctcgagacctggatcggccgacatgaatttctcgtctccgaattctagcggtaatttcttgtcttgcatttccagcggaagaaggcccagtgcctcaatcaaccacatgaatacggggacacacgacagagcccaaatgaggaaaaggccgaataaagcgagcatcaaaaaaatgatcatcaatgcaaatcctggaccgtccgacccaacgaatcctgttgcacggacggaagctagaaaacatccccaagcggcacagggagcgccaaaaaatacagccagatgagagagcctaggcatggttggtaaagagggaattgaatggggattttgtatatgtggttcggggttgggccgacttatgtagacaacaggcgactcgtgcgccgctagtaaccggaagtcacgcccccggcccgtagtttacccaccccactcgggtggatgcacgactagcaggaactcctagactcatcagcttatcgttcggcacgaatttgactgtgtgcaggttgtagggcttgaatctagcgactatgatgaggcggctcaaagaattctcttgagaaagagttgttcttagccccaaaagaattatgggagatatcggtgatgagatcaactagaagatcatacaatgcagtccaaacagtcacaattcccccttataatcatattcgcgtaaagattatcgaagatttggaagccggaacttggcattgaagtactgaggatatatatatgtaattgaaacgcctcatcctcatctcagggaacttcgtcctgtcaattaagaaccctgtttccaagtcttctaacaagtcaatgaagtcactgggtacttaatcggctcggcagtaagacacaagtggccagtccaagtgcctccgtgagagaatgtgcgtcgagcaagaattcgaatttggcttgctcttgattacatccgcaatgaaatcgtcgggtagatgcctagggctgacttggctgcaaagagcaagggcatttcgggcaggtacaacatatgatttgaatggccccaaatacctaggcaggaggccaattggatcgaataaccgagaccattatctatctcgtactttgacgatgtaaaaagatgtctgtggacattcgtggtggtcaggaaggatataatgagctactgagcttactagaaagtagctctgccaggcacaccatgtaatgattggctctttgtaaggctagttcattcacttgacttcaaaccggaggtgtacgtagttgagtacgtacttccctcgagaaggacccacatatcagaccgtgctagcaatcccatgtgcttaagcgaattgcatttagggaagatccaggtttgtgggaaaagacaaaccaatcacttcatacggcacagttttataaacgatatatcccccactctaaaatacctataatatctaaatcgatcgtactgcaggcaggcgcagagctgaacttcctaggactcccaattggaacaattgttgacctatcaacggtagaccgtggcaccccgcctccctcctagcgaagcggttcgcgagcgtctccatgagatgggcaaggaggctgctagaatggaatggcgagatccttacgtatcgatcgttccgtcctggattaggagactcatgccccccttttattcgcgccaatatcacttctaagggctcgatggcaacgagcaagacctgactgaaaggggtgaatatggtattcgacataggtgcatatcggactattatcgctaaagagctcctctaccccacctttcgagaatacctgcgggaccctatgaatagcaaacttaatgaactttccgtgaccctccccgcgcacagtacctggaggtctgctatccaaactgtggtagcagccctaaacgatgtcgatgaaccctttcttgtaataccgcgaagaagcggtaaccgtcgtgtttttacacaattgttctaaggacggagcgagatggggaagtttgaagaggattatctcttcagggtggaaggtcttggttcgatcgagctatgaggcgcgttcaactataaatcatgccttgttaaccgaagaacgcagtagtccatttttagagaccgagtgattccagaagaacaccaacactgagaagactcgtgcggaataaagaacggctaaagttcatacaggacataccaaaacgaaaacatgaaaaatccagctcctgagacagaaaaaaatgtagccaagcgaggtggtagcagcaagtaataaacaagagtaaaaataagccactcttcgcaccgatacatcgattcaagcaaacaccatccaactaaagaatttcaaattgagacaagctcgccgtccagattggcatattcctcgactaaaatgtctccccagagttgatctgagaccccctctcccctggcgagaagtacatgccgaggaatagcccgaaggctaagtcgatcaatacaggaaatttggccgaataaaatcccaactagctggttgggcatcttggccttaggcagaataagcgcaacggcgtcaatgctagtacaggaatttgacaaagccagactagaatcaacctgcacagctataccgtcaggcgagcgatataagtcgtggatagggtcccgcaagtattctcgaaaggcgggggagagtagctcttcagtgataatggtccgatgtgcacctgtgttgaacaccatctctacctcttcaagctcgcatgtcaggtcttgctcgttgccatcgatccctttcaaggtgatatttgcgcgaatcaaagggaggcatgagtctcctaatccggcatggagcgatacataaggatctcgccattccattttggcagcatccttggcaatctcacgcagacgctcgcgaaccgattcgctacgaggtggtcggggtgacaccgtccccaggtcaacatttgttcggattgggagtcctttgaagttcacctccgtgcctgcctgcagtgctatctcacgaatagctcggcggttaccgcatctgcgcggcattacaagaaaggattcgtcgacgtcgtctagggctgctaccacagcttggatagcagacctccaggtactgtgcgcggggagggtcacggaaagttcatcatgtctgccattcattgactcggaaagctggcggagaagttctctcgggtgcagtgttctttcttcggtacccatagttgacctaaagaacaagattcataagttctctgtaagattatagatgcttgtttgatatgtacttactcttcttcctcttcagcctgaaggcgaacacgtttggtttcaacagcagctactgcttggctgcattcagagtagggtcgtttaaaactagccacgatgagctggtatcagtgattgtgtcaaaatattagtaggtgaaaggctgcataccttacgtcgcgataaacgtagtcgttccctcttgttcaaagtaggaagccgtgtcttttgagtgtcgataaggcaggagcaggatcgatgacagaaaactgacgacagagagtgaatttctatttctcggtcgggtcgcactgggaccaacgtaggcccgcaacgcactggccggctaagtccgttaactctgacacaacatccaacatgggacacatacacgaccctaaggaccctcataaagcggcagcacccgaccaagaactcgcatccgcagcctaagatccggtatgaattacatgctgctgcatatgtattaatgcaaaaataacgtctccctgccggacgggtgaatatgtacggccacccggtggagtacagtcacagagcctcatccctagcctacaatataatccaccaatcaccacccgcggtaacattgacgctttgcccgggtgtgtatcgaacaagatgttgccagatcattgcgcaaaggcaacctttgcaacaacctgatgagcggcatatttccgtgatgtaaagtataaatgaatatattactctgtacggagctggacagtacaaaaaagcataacaataaaaaatgaaaaagcgaaactaaaccttcttcccagataacacccgttcaaaggtcgcaaagttgccttcgttcttcgggtcatagacagcaaagcacacctcacgccaccagtttccacaaaactcagtctccctcagaacctcgagccagcagtgcgcaacctcagcagggggattcgcatacaccccacagcccaaagccccgaggactagcatcccatgcccattgaatgccgcaatacgcagtgcttgcctcatcttagatttggtaagtttgcggtccctgtcgcgcgcgaagacttcttgggtacgccgacgggagggcgagggtgaagtcgagcagtggcgtgagctgtggtgtgcgtgtgggctatggccacgtcgctctttctgagaatctttcagcaccactctccggagtataggtcgatagagagcggcgattgtaatcccgctgacaacaggaagatcttctggtggagtagtgggagactctaacaaattgtgtccggaggctaggtcactccgcatgaccagaacgtaggggctgtagatggactcgtctagagcgagcgggtaatccctgctgtggaggctgagcgccagtgagctgcggtagcagatggattcctcttgtgccatcgcgccatttagccagcccccacctggttttcggtagctagcgaagttgataattattgggcgggggttcaggcttggatcgagacgttgtgtccgtgcggactcaaatagtccgacggccacgttgagggtatcgtcgttgatgattttgaccgtcgctggtgatgggaagcgggggcagtcgctggggtgtaagcgtctgaccgaacttgacgataatttcttagatttgtgggcctgattggtggagttgagccggttcagaagaactgagagaacgccgatggtctcctgggccgttcgcctgagggcctgcctttggggacttgcttcggtatcttcgtgatggtgatgggagtgatgacgtgatgtatgccttgggcttgggatgagctgattttcattcaccatgtcccataatcttgacttgatgttttgggaagacatattttctgtcgggtattgctaatttgatgtcggagagagagaactgatcgtatttgaaccagcgctagcgtgcactatacggcacccttctcaccagcggcataccccgggcaggcttaatcgcgtattccttcggtttctcctggaccttccctaaagttcgtgtaatcataaatgcgaggtaacagaataatctcggattaacagaacttaaagactctatccacctacttctagtggtaggctacggaaccccgtatcatggaccagaggttaatcccatactacgacattaatcaatagaaattaatacatttcacgtataactaaataaaggtccgaatttgacaatccggtcggacataattaataagcaagcgcataactcgtcaaagtcacatgcttcggcggtaaaatgaccaatcaaaataacacccctccagggctgtttcttgacagaagtcaaagcaatttatgcaggtcaacgagcttagctgtgttggtattgtttacagtgctgtagcaccgaatcaagggcctagtgctgcggcgggaccggtgctgcagcacttgtcactcatctcggtccccggtgatttgttgggtttaggcagctggtattgctatcgtgggtaaggtagaagggtggcgtattaggattttattgaatatatgaatgactgcattgtactagagagggaaggaggggttatgtgcccccggactatcagagattgatatatattccgatacttcgattataatgtgttattttgctatgccccttcgtaaccacgtacaagtaattactagtaggggatagttattacctcgacctagtggcctagttgttaccatcttcatgattgtctactatatggctctaccgattggcgactatctgtttgcctgcttgatcgtctgcttgctcgcttcctatttgcatttgttatttctttgcttcatagattgtttgctcgttgagtaagaggtccgaggtttgcaacatttgaaaatggtcagctatatcaacaggctgcctcccactgtgcaatgggctacatatggagtgtggttcgtctgatttagtggacggaacatgtcacccgcattcaggaaactagaggcgcaggacgaaggttaccactagtggcttacctgtcttggctttcaatccttatacgaacgcaacgcttgctttgcaggtgccaccaacaaagatggtattctcgacctccagattaccaagttgtcgagccattttcttgatcatcttctctctagttccatataatattatcaaatatagaatattcaccttcaaaacgatgtccaacccaggatatcccagcgcttggaagccgggcaagcccccacgaagcgtggttcgccatcggcggggcccacctctattcaatactctcaccgcgacggcctatgatttgcagcagatgatgattgccggaaccctgaagagtaccgatctggttgaggagtatgttcgaaatattgaggagcacaatgggtatcttcgtgcggtctctgtatatgcgccagttgcgctggaacgggctcaggaattggatgctaagagggaagccggtgaattcttaggcccgcttcatggaatccctgtttttatcaaggtatagcttgtccttttggtcagctcttggtcctttcatttggctgacacaatcagtgggccaagcctggagatgaagacatccacaggagcagtggcgctcctgaatacaaaatccaccaaaaatgcgcaggttgccgacaaggtaatctatttgccccgtcaatagctgtttcgaggtttcaagtctaattattattagctgcttgctgctggagcggttattttgggaaagacaaccatatcagtgggtacccagagagattcaacggagaatccagaacggcacagctaatgcttattcaggagctaagctatcgaaagtaaaattccatcgacgggttttcttcatgtttctttttgtctaacattgttactagaggaaaaggtctcccatgcggttggtctgcagttgacggccaaggacagtccctatattcctgggggattcgatccaaccgattcgatcggagggcatactgtatgttcttattactcgtccctagagcgaggaaaattgctgatacatagcacataggtacccggcggctcatcctcaggagtttccatcgtcatcagtgcaggtcttgctgctaatggagttggaacggataccgatgcctctattaccgccccggcagttagagcgtctctgtatttaattcgaccgactaccggaattgtttcagtaaatggtacagtcccgtgcccaaagacttttgacaccatcggcccaatgggtaggagtgttcgagatgtagcagacctcttgacggctctcgttgagccaggcaagacaaaaaccccacaaggcggttatgcatcctctgctaccaaaaaccatggaaagtcattcaggattggtacgcttgatccagaagtttggaattacccagatttcttagtcaatcccgtgcccgaagctacagagcgaattgtaaggaatcttttccaagtatctatgggttctatatctaacagacttatgcagaaccgaattattctggagacatactccaagattcgtgagggcttggccagtgtctttcatgagaatgccgaccttccccctgtttcagaattcatgctgaacgggaaacattccatctacacctcttgggtatgtcttttcgtgactttacgaactattggttctaatagacgcagatatcgaatgagttgatgttctcaacgactacctcagcgagctgccaggatctcccgtgaagaacttagaggaacttgtgaagtggaatcaggagcacgcagcagaagcactccctaccggtaatctcccatcaggtaactcatagataatctctaattctaacagaatatccgagtcaggatgtgttgatcgaagcactaagcgcgaagctgtcccccgaccagattgagacgctccgtgagcactatttagccgtaggttcaaacatcgacgcagctttacagaataacgaaattgacattactgtcgcccccggagattgctttttgactcaatatgcctcagccaaaggtacgatgttcttcccgactacgtccaactctgttcgacctattgggctgcaggtgattagttctgctcatcgtgaggaccttcttgttgccttcatgagtgcctttgaagattcgatctcgaaaaggtagcccccaactgcgttccttcaggcctcgaaggaatatagcaaacaagctctaccctagcagagaaaaagggaactttgatgaggcttccaaattgactgaacaggcggaagtggagagcatgagaaaggaaagtcagaagcatcgagtcggatgaagagaaggcatatatgagtcatgacatccttatactggtgaaattcgccacaattgtcaggacacaattctatttcgcaaaaatcccctttggttgtttctttctataagcacatacacgccaggcttgtcatagctacgtcggcgtagaagtggtgtgcttatataatattccgtactcggcgctcaggtccggggcgtgctaggaattacccagtgagcaaaaagcggcaagggctagatacctaaaacggaaagagaaagccaagaagtggcagaggaaagagctacgtatgttgtatgccatctcaatatctcaattgtataatggagaacccaaacctcaacgagatccatgatttcctagtctcattggccttcaaggccggggacatcatcaacaatgcactcccagaaatcaccggcacaggatccaaactgaatagtccgtgtccatacaaacaaccgaaaaaggaaaacagctgatatctctaggtgccgacctcgtcacggaatatgaccgcgccgtcgaaaacatgatctcgacctcactgcgggagaaatacccacattacgagtatgtgttttctcttcgtggctgctagcatgcttctgatggtgtgtattctctcagattccacggcgaggaaacgtatgacccggcacgcccattgaccgatgcgcctacgttcgtcgtggaccccatcgatggaacgacgaacttcgtgcatggttttccatttgcctgtgtttcgctcgggttcgctgttggacgcattcccgcggtgggggtggtgtataacccctccaccaaggccctttactccgctattcgaggccagggcgctttcctcaatcgtgaaactcgcttgccgctgaaaggcgaccatgtcgagcccctgtctggactagctaatgctctcgttgccattgaatggggcgcagatcgcagcgggaacaattgggagactaagattcggacgtatgagaagctgggtaagtccaaggaaaatggtggggctatggtgcgcgcaatgcggagtttaggctcggccgcgttgaatttatgtgctgtggctgagggcacgctggatctgtattgggagggtggatgttggtcctgggatgtctgcgccgggtgggttatcctctctgaagccggcggcattatggcggatggaaaccccggggtttgggaagctcgtcttgacgggcggaagtatcttgctgtccgaggttctccaggcggaactggacaaaaggagatcgtggaggagttttggagccatgttcaaggtaaattgaagtattgatcgcccgcccataatcctctcagactagttgaatacgacagacagtagaggtcataattcaaatgtaacattctcataaatacagggtatatgcctaaggaaactgtatgtacaatgaaaccaatggcgctatatgtgacggaaaccagcgttggtcttcacttcgaagccggactcgctgtcatcctcgacaacttcacgatcagtccatcgtgctgaatcctgactcgatacaagatttctgtcacgggtgcctatgtgcgattcatcttcggcccttgagatatcacttgggccagaagatccatctttcgatatatggagatcggatacatttggcaaattgtctgtatctcttattgactttggatcgacaggatcggactgcccttcaacctcgtcaccagagctagtcggaccaacatttggagacttggccatctccatattttgcttcagagaatcgtcggtttccgcagtgagagtgtggctgaagtgtgtatcaaccaagtgcttcacaacaggccagccataggcattggtgaacatgcgccgcacaataatgttattgtgggcatcaggctcaagtcggacaagaaccttacgccaagtcagatcacggtgataggctctcgcgattttttcttcgaccttgaggccgctttctttatctgcaggcggattctgagagtttgattgcttgccctgtggcgaaccaaatgccaatatgcgtcgttttaccggtaaagggggtggtatatcctctgggtggtagatgcggtcgtggaagattgtccggggtcgtgaggcagggtctgaaatgaattccgcgggtggtaaaggcggcatcaacaagtctccagcacactcgaaaaatgttgtctttggaggggtgtgcattccttcgtggtcatggtcatgattaatgggcattgtgctatcgctgtcgccagtctcaaaagtgctcagggtctggctacgcttataaattctagcattcttgctattggggggattcttgttctgagttgggcgaaacagagaaaaaaagctgtccatgggactgtgagaggtatttccagggatgttttctttcagaacaccttcctctgaaactttgttgctggacacatgactggatggtgccaggaattgtgccggcctcggggagattgtatcttcgtcagagacatcgtctttgggccttgggggaaccttggtcgcagaatatgcatgatgatgaccggcctccattgggagattcaaaggcaactctccatcgtggcgagcaagtcgcggggatttcgagttggcgcctgtcaactctgcccacccccattcggccatggttccaacaagtccattgtccctcctcgctttttcaactcgatccaaacctttccagtccaagaacaaaagagaagacgtccgcaaaggaacaatcccatcattcaccacattcgaatagactgtgcggtgctggaatttcttaagaacctcgtaggcaggaccacaaggaagaatccgaagaagtggcttggagccaggatctgaatggccggggtcttttgcagactctcctcttccagcaataatggcaccccagccacttcgaactttcggtgccgtccaactcaacccgagatcttggccggtacgaccaactagacctagatccaatgcaaatcgaacatacattggattctcattgctgagaccaagaaaaggggttgcaagggcaataaagttaacgggtctgatttgctcaaagaactgaggcgagtgcttctggatatatgcgattgcatatgtctgaatcagcccgccaagagaatgggcaatgaaactaatgcttgtaatctggtaagcatggtcttcatcttgaaattcatgggcattttcttgaggggttgattcagccgaatgagaaaatggttcagctcgctccttgcgagcactaaaaggccgggcaaatgggctcggctttgagcctctgagagggaaatagggttgatcgggatatgtgagaagcaggacatatttggccagccgtttgccgaggtattgaatcccacgctcagtccgaacagcattgccagagaaccctctaacaatgacttgctcttcatcgtcatcgtcggagttatcaccagactggctattttgctcttcagtatgactggatttactgctgagaaaattcgggattagaattttgagacacctaaacgttcagaaaggaattccataccttgtcgggttttctcggtctacaacagggctagcatggggatctctggcttgacgtttattcttcttggaatttctcatgcctgtgtcaatgctctccttcaaatagagcatgtctgcaccgaggttgctgtgcaacccatgtgtcagtaacacgagatgcaccttcttctttttggcgcttttcatcggagcttccgtagactcctccggtactggattatcacacacgggttgcgagtcatgactcttccgttcaacgcttttggaagcaggcttcgctgaggggaatggcggactgctccatagactagttgtatcgtcaacttgaagagcgattgattttgagtacacgcctttcgaggcaagcacctgactacctctagttccaggcagccaatggtcttgtaactttgccggaggccctggagagctatttccactactccatgtaccgcccgaggaatatgccagcgacttttcatcacgacccacaagaagctcaaaatgcaccgctgcactacttgagaatatcacctgcgattgaatctcaacaatccagctaacgctatgtccacttgccggtccaccttgacccggagagccaaagtcgtgtgcttcctggaggttagccggcaccttgatgacggcgtcccaaccacctccggccttaaggtagggctcaaactgcggtgtaccctccagatcctgtcgctcatatttggtgttggggtcgaactttgtgggatagcacgcggcgtatagcgtgtacgggccatggaggtatgcggcgcgcagtgggatggcagatgtgttcttcaccctcacgtagagatttgaagggatgggcaggatcgggtcggccgccggagtgtacgtaaccgtgtatctgatggtcggtttactattagcaatccagaaggacttcggactggagaagcaagaacgactcacctaacgacttccccaacacggacactaccaacttgatggattaacaacatgtcggtcggttcctttgtatccaccggaattgtttcccagccggagaaggtatgaaaacgcgacctttgattgctaggctgtgctgcaccttggtctggggtctgggaggccgaataggtgcgcgcagtgatcagcatcgaatctaatgggcagttccattataatcaagcaaattccaaggcgctagataagagagtctagcgagacaacgatatcatttgctggagcaccccatatgctgggatgggtggagtgtggtggtttacggggtccaatctcggagacggcggaaaacacatgatcacattccttttaaggatcgacaactcataggccttgtttatagccatatacaatgctctctttagttctaggctaatacatggtttctatcgcaactgaatgaacctccgcctaattaatcaagttcagcaaacgcctgggttctttagaaatttccatccaaccgttcctttcgacagcgacgatctttccatcaatgcatacgcgtcgccacctctcctcctcttcttgaaaatcgattcgaacctgttcaacatcggcataggtgaccgtgtcttccttcacatgttgaccgccctggtaggctaggatcatcaactgcattgcatcttccgccggcataggaccgaagcggataaatttcatccgtccatccagggccactgagtccggggagatcaagaagtccttctcaagccgtgggacgagtgcagtaagtgcatacatgtgctcaagcccttccactgcttgttggcgtgtctcgttcggaccattcaaggtggttaatgtgattttgcctttgaattggtgaggtggagtaccgtctgagggatgaagtagctcatttgcggccatcttgaaccgatcggctccaaatttgcgatactcggacgtgtcgctgtcggcgactaatgcagcatggagtccccagctcgcaacaacggctccgtataatgtgtgattaacatcggtgtcgatatcggctcgatgacgaccttcatcgatgaccatccgactgccaagtgagaatttggcagcaaagaccggtatagaagatggactgcctcgaagtagtgttgaaagacccggcaccgggccagatcgtaatccaatggaacttgccatggcattccctgtcccgcaaggaatcaacacaatattgggtgatacaccaatcgatgtcttggatttgtagaaaatctcgagaatgtcgatgagggccccgtcgccagaaagaaggatgatagtctgagggacgccattatgagcccgctccaagaatttcgagcgtgcaagctcgatgatggtttcggccgactttgtttcgtagagctcgtaattctctagaccaatatattcaagaagcggctgtacaacatcttgaaagactgtcttggcattcccggttcctgatccagtcgataccacaacctggatgacaggtgtatcttcatgtcgaaggtggcttgggatcttggtcacaaaaggagatagttctgcaggcagggactcgatatcgatctttctcaaggagaagttctcaggcttgtcgccgtccagttcggttttctgaaagaacagcacactatacgtgggtacatgattggacaacacacagagaatgtcgttgaactcaatcaaacactcaacgcctgcgtgagatgtgtatttcaagttgcgatcaactatatcgaccgggaaaggagcagacatctctgatatctctgagtagtagtgtagtgggagagaaatcaacagttccttgagagggcggggttgacggcttacccggactttaagccatgtcgtactacttgggtaaaaagacgacagactttctagcagaaaagtactatgtaactatgtattatttgactgtcgctttgtaaaaattgaaatgcttaactacttggtcaattatttgtcaacatatacataggcaagacacccaaatcaatgattcccattaggtacagtgagggaataagatggttgaactcttatactaccagcaatgactctatatatatgagctaggtatgggcgactgatgggacagtctggtatacaatgtaggaatgcttgtccgatgtggatgcacgttggaatatagaaacgtagatgtccaacgttggacgtaatcaatttgagattgctagtattcttcttgctacattgttctactagatacataatacagatacagcctcgacaagacagaggtacacaagaatcaatgaaatccaaatatgccaatcacgaaataaagcaaaaaaaaggccatcacaaatacaatgttccccgagatatcgacctcagtcctgagttggggaaataccacgtgagggtgtcggtgaagtctcatgagagctatgcttgtcactgaggtttaccgcaatgaaggtcttgggtagttccacactgcatgcagtggtcagtaacaattcagggggttaaggtagcatacaacttacgtgttgaatttcgctttcaacgtctcaatcacctccttccaatcctggtgggctgtcaggcttcggcgcggggtgcagccgatggaatgcctggaatcgagttgcacgtcaagcgggtcgaaggcatgacaaccagggctgactgatatgcggatggagtaagagtaagagtccgattcactgtcccgagcttcgtacagctcaaagcaaatctgagagagataatcgagttctgggatggcactcctagcaatcttagtttggattccaccttccaagatgcagttcaagagagtgtagatatgagattccttggtgaagtagaagaaggatttggcatcctgcgaagcttgcacctcttctagatctcgaacaatttcctgaaggaggggaagagatgttagaaggccaatctcgagtttctcgctgtcggtgattccatattcctggggagtcacgtagtcgaacaaaaccttggctagcttgtatagttcccggagcttcgaaagccgctcatccatcttggacttggtggattgggagccagggaaaagcttgaagtaatgatcgtatgaatcatctagtgcccgaaggtgcggcagtgactcgggggcaaggacgcgtttcttcaaaccaaagcgatgagcaaacgtctggctttcggtgcgatcctcggatttgtcgttcccggcttcctggtcaagtttcccctctgcgcttgcgtctggctttgttacgctattgcttctctgttcttcatcgtagtcacgggtactgtcctgtggcatgaagacccattccaaaaacggtctattgtggagtgcatcgaatttcatactgtcgtatagctcggaaagcttgctcgggtcgaccttctcggtgtcacagaactccgcaaagagcttttcccaccgctccttaaagagtcgaggatcttcgcccgcgcaccagcggccctgtacggtggatatatcaggggaatccactcgatccacggaggttgtttcagggtcattgggtggagtcgggaagatttgcgatgagctgtcgagtttctcaaagttgtgtcgcatgacactccggtggaacttcatcagttcaactaccctagcaaggacaaccgaaggctctgggatatttttgtccttgggccaagcaaattgtgaaggtgcagacccttctcgcaaaagcaatttcagcttcttcttgactttgtccatgacatccttggcggcatttgagtcatcaagcaaatctttccgaacttgaatcaagccttcagggatatccttctgatccaaaaaggagcatgcccatatttgtgctgtgagaatattattagcttgatccagatcatggcaagggaaatgacttaccactagtgctcactctacgttctgagctggtgaatatacgaacgttattcaacgcttccttgttcatcagcttgagatcatcccgcatgttcagtccaagatcctgcgattgataacgcgcggcatgtgtgggctcgccaccccacttgatcacaagctgcagtttgtccaggatcaaatcgttctcggcggcagagaaccgagaaaaagtcgcacctgagatagaatcacttcgtgactgtgatctacgtaaatcctcgttctctggagtgagtccctccccttctttgggcacagttgtagtggactctccatagagcttgcccttcgacaatggagttgaagctctcactggaggttctcccatttcttctggctttcgtttccggaacattggcttgatctgcactttggtaccaggccaacctccctttttgtctaaagatgcgcggagcaacttgagcttctccttgtcttctaagcccttctccatagccaccttgacggcatcagaaacactggccaatgcggtttcccccttaatcactatctcattctggtgccctttcagcaagtcaacgaaaggttggctgtggaaagtgaacttgaacttttgctttggggtccgatctgcgtgtcgaatcactgccaccatgcccttcagcttccaagagtgtttagaagcaggaagaggcggaagggcttcgtcattggcgtgctgtaccgaaagagccggcgattttgtgttcgagggaccatgattagaggagtagccttcccgggaattcagcttgctgagagcagcgccaatatcagcactctctaccccagatgacgccagtgatggacgacgtgactctgaaacctcggtgggtttctgggtttggccgtaaagcctggagttgctaggagacttcagcaatgtctttagagcttggcgatgagatcctgccgtgctccttctggatgagcctaaatccggtgatggcggctcggaggattccgatatcccttcgcatttgcgtctttcttctaggaaaatatccctgaggatgttggcacacttatcgtaataatcattgttgtccttgacgaagctccagccgttgacgtcaatgacatagcttttatctcccacgcggagcatgtcaaagccacagattctttgaccaaatccatttgaaatcttcgatgcgattattgcctcctccttgccaagttttgtgatgtatcgtatttccttcccgtgggtattgcgccgaacgagaccgtcgacgacgggagacttgcgcgtctctgcgtgacaaaagtttggcccaacggtgtaggctttgacatcttccgcattgtcaaccctgaggaactgctcgtatagataactagcgtccttctcggtgatggatcttggaacagtgagattgggatcatattccgaacttttgttgccgacctttcggaatagtcttcttccacctccgccgtaatgttcatcgttggggaaatagatgtgaatgttgtggtcctcgccattgacaggcttttcaacaaagggctttttgaacactttgccatcaacaatcaaggcctcgccatcctcggacattgagacgttctgagtcagaggagcaccaccaccaattccgttctctgggccttcgagcttgaccccagtcaggtgatagatatgctgggccagctctggcgattctagaaccggaccgccatcgcggttgacctctatccgcttcggggtgggaacacccatgtgatccagaatcatcaggcagagccgccgatcccacaggaccttttgcataggcaggtcattaacacatagcggttttcgaagcttagcatacgcaatggctttgtccagggggaatccatcggaaaagaaagcgagcaagaagtcacacacaggccaattctcgactgcttcatcgaggataactttgtctccaaaaacaatcacctcaaattcgcctttcgattgcagtcgagtcaagatattctggctcggtttgctacgtgctttcacatccaaggcacagactccgatcctccatggcttgagggagccagattccgcctcatagatcgagcttgcagcggtactggcagctgtgcttccactgaaccttctaggtgcatggcttaaggggcgtgtagattgtcccatccgactgccggagcgaggatcaaagcccgaatcggcttttcctgattgattttgtgtcgattttgtgtgtgacgtaggcttagtcgaagccaatgggggttcgaggacgggccctgtgggcgtctgatcgttgtaatcggagtccatatcaagtaaaggcgacgaaaggttgggttctgcaggtctcaagggttcagcaccggctgaagagccgttgctgtgctcagcggcattatccatatgaggggtcaattgtctgtataggattgggttttagatcaattaaatcgtatgagactaattttgatcaatgagatggggattttaaggaagcacaaaatctttggtagcagttcggagaaagaagcgcagatcgagcctggaagctcttggattccaaggttgtattaccaaatatgattggcctcccgcatgggcgacttttcgctggtctaagtttgtatattttcgctcataatcagactagagggctgggaaatggtatgtttattgtgtattcgaatcactgggcttcctcgtattcctataaagtacttataatatatctaaaagtacatatgcccctacccaggtacttattgtagaagtcttcactacatgataacacattttgatagcattttggctatacagagcagtgtcggataagattgttgatgcatttgtgtttgagaatacaatgatttgaacatatgtaacaacgaagagtgacgttaagttaaagatatcaaagagatattccggatatgctcatcacgtgaaggtattttatacccggggaagatgttcacccgtttgaaggcggtctagtgcctgcaggactaggcggggcagaaaaaaacatcaaaaaaaaaagaagaccgagctagtgaagacgacggagataccctttgtgacttgatcaccaagtcagaacggaattatcactccaaaggctaaggggcttattctgattactttggatcctacggcatatccattgtcgttagtgtgtccctcgatatcatgccttcttcggccgataatttcgatctgcctcttgcgaagaggcagaaacgggtatcacaggttaaggctgggacacatggttccaagatctttgctcctttccgtgtaagttgggggagacattaaatcgcttcttttctccaaactgacatgtcgctataaagacactaggattggtgtcgccaacacccgttccctttacgtcagtgcgcctgggtaaatcgacctttcaaatcacaacctccgtgggacactcgctgcagacttatgatttgcgccgaggtctgaacctcatctttctgagtcgaccgcaaacaccagagatcattacggcaacatgtgcgtggcaggataaggtattcgcagcttggggccatctccggtcgcagtccccaggaggcgtctgggttttcaagcgcggcaaaagagttgcagttcttgagggccccgcagacctgaaggggcccattgagcgcttggtggtgtttggctcatgggtggttggttgctggaccggtggcctcgaggtttggagaacgggcacatacgagcactatgccagtctgcggccacaacccgctcggggttcctctggagagaagatctacactggggtaatgtgcaacatgccgacttacctgaacaagatattcgtgggccgatcagatggagcggttgatatctggaacctccgtagtggaaagcttcttcacacgttgccctccttgtcggcagatgctgggcccgtgactgcgattcaacccacacctgctctatcgcttgttgccattgcctataagggcggtgcgttggctattcagaacgtgagctcaggccagctggttttgtctctcaagaacgcatcatcccggggtctcccagtaacttccatcaccttccgcggcgacggattgggtgctggtcacgatggtcgcagctcaggtgttatggccacagcgtcaagtggtagcggcgatatcacactctgggacttgaataatggaggtcgcattgcaggcattcttcgtggagcccatcgagtgtcaagcggcgaaaagcccatgggcgccaaccgtgtcgagttcttggatggacagccagtgatcgtgtcatcgggcgatgacaattctttgaagacttggatcttcgacgagacgccgttctcgcccattccccgacctcttcataggagaaacggacactctgctgccgtcagcgctcttgatttcctgccgacgtcttcggatggatccgagtctggcggcaagtggcttcttagtgcaagcaaggattgcagtctctgggggcttagtctacgcaaagacagccagcataccgagatctcgcagggtagcttggaacgcaaggctaagaaggcagggccatcgaacatctcaaatacagaggatctcaaagctcccgaagttacatgcattgcctgcagcctcaaccgtgatggtggaatgggagtcaccacttccggtccgatctggtcgaacccgaaggttacaaacgccgatgcttccaacgcaaccggctgggaaagcgtggttaccggtcatcggggcgacaagttcgcacgtacttggttctggggcaaaaagagagcaggtcgatgggcgtttgcaaccagtgatggaacagaagtcaaggtgtgcaaattcttaaacatgactgaacaattgttttcctttgctaattcattcctcagagtgtgaccgtttcgcaatgtggtactttcgctgtcatcggatcagctgggggttctatcgacatgttcaacatgcagtcaggtctacaccgacaaagtttcccagctcgtcccccagctggccgtggtaccaaatccaatgctcagacctcgatcactgaggctactagacacaccaaggctgtgactggtttgatgattgacaacttgaaccgtaccgttgtcagctgtggcctggatggcaaagtcaaggtacaccccaccactccctcttttctagagattcgcaaactgacattttctggaatatagttttgggatcttctttctgggaaattcattgatgaactagactggcatcccatggctgccattactggacttcgctataacaaggcgagtgaattagtcgccttcagctgtgacgacctctcgatccgtgtgattgacctcgagaccagaaagctcgttcgtgaattctggggatgtgtgggtcaagtcaatgatttcatcttctcaaatgatggacgatggattattgctgcctccatggactcggtgatacgcgtatgggatatgcccaccgggcatttgattgacatcttccgcgtctcaagcacatgtgtcgctctgtccatgtcttcaacgggtgaattccttgctaccgcacacgccggtagcattggtatcagcctttggagcaaccgcagccttttcatgccgatctcgaccaaaaacctggacgagaacattattgagaacgttgggcttccggcaacatcgggagaaggtggtgctggtcttattgaggccgccttcgtggatactaccgagcaagaagaggcagaaggcccagtactggccacggaacaactacaacacgacatgatgactctgagtcttgtccctaaaagcagatggcagtcattgattcacctagacactatacgggtatgtttctatctctgcacgggtatgatctctagctaacagttcaataggaacgtaatcgccccaaggaagcccccaaggcacccgagaaggctccgttctttcttccttctctgctcagttccagtggtcccgaggccggcgaaatcgccggcgccgaggataccgatgctggatcgatggtcaaaaccgccgaagccgaaaggttgcggattgccaagttgcaaaatggtggaaaccccggttctcctcaatctattttcacccgatcattggcatccggccatgattccggtgacttcagctcatttatcgaccatctcaagaccttatctccggccaaagcagatctcgagattcgttctctggatcctcgggtgcgtgatggacactctgagttgtccgatttcgttattgccctgactgctcgcctgaagtcaaagagggactttgagcttgtcaatgcttggatggcggtctttttgaaaattcacgccgatactgtgagtctcagctctactcaagatgagcctcggtatcgtctattgcaagatgctcttgcaatttggtctgacgagcaacggcgggagggaaagcgcctggctgagctggtgggctactgtcgcggagtggtcggattcttgcgatctgctcggtaatttgaaatggacagatctatacttatgtacttactggataaatatctcgggacatgagtgcctttttttctttgttatctatcacgcgtgttacgttgaatctatatgcatttgttctataaatccagtgattttgcaggaatttagggaacttctgcatcctatctactttgttatcatcttattttatttccgcaccttctaattctattcatatatctcaatttaaggaaagatgagatcaatattccaagttttctaggttgtccaaacttggacctccggcgtcttaccaccctgactaatacggatttttttttttcgagaaacaatccacaaccacgacaagaagggttcttccacgcattggctatggggatcccccatttaactaggcacttactgccatatgccgaaagcgtcttgttagatgggagggcgatcgattcagaacttccgcacatccaagccgttgtcattgacgggcccagcctagtataccatgtctaccgtcgactcctgggctggatggacccaagcagtgatgtccttgactaccagccaacctgcgacgaaatcagtcgcggggtgagcagcttccttctccaattaaccagaatgggagttaaaatgtaagcgctcacaactagtccgaaacacagctatcctctgattatcattttcctttctctctctgtcctttagacataagatatgcttcgatggtgccttgcctatctccaagcgaaaaatccgcttttccagaattgaaaagttaagacatcgactagaattggctcgtcgaaatttgtctctgcctgctacgcccaaatgtcgcgatgtgattccgactgaacgagggcaggtctggtgcagtcgaggcttgccccagcgacgaaaaggccttccagagaatcctttcatggtaccggcggtcttcgaggacctgctgaaccgatggagcaaggaacagatccggaaagaggttgacgatgatatcagttgccttgtcaccgatgtcaatcacccctgggcggaaatcactgtcatggtgccaggagaagcagatgttgagtgtgcccgtgtggcaaaacttaccggctgttcagtgttgacggatgattcggatctgctgcttcacgaccttggtcaggatggctcgctcttgtttctagactcggttcaaacgtcctcgggcgtctgggatccggccgagccagatattcgggggctgaggatctgtccccattcgctctctggccgattgggcatcccaagcgttcagtggtttgcttacgaattgcaaaaaaatgcccacctgcgttttgctgaacttacccggatatctcaggagagcagtaaggcgactgagctctcctctgaatatctggagtttcttcaagaatatcatgacgataccactgataacgcggtgatacctggagcagagcagtccgtacaactgttggatccgagggtatcggagttattttggcagtatgaacttcctagtatttactgctcggatgaacagccacacgtctatctcgggattttgaacgaagatttttccagacgatgtgcctgggaacaaggtcgaacatataggtcccttgggtactcatttttcaacctttcccgtcttgttgtcaatcgatacgcagtcgtacatgaattcgttcgcaggggtggaaggatcgtggccgaggagatcactttaagcggaacaaagaccgtgatctccgacctggatcttctccagaaacgtcttgcgctagcacacgctacctttgacgacggtctggcagcggagagcttctggtttttgtatgctctttccgatatttatcgtgatggatccggtacaaccacagttccaaatgcgaaggggttggagagctttcttaaaaatggatatatggcgcgaagtaccgaatgggcggatattcaccttcttgctcaaatgcaagctgcactgtactctttacgaatactgaagcagctgctcgatatcgcaactcctggtcttgacttggttgataccagctcactactcgcggatttacctccactacacataatgatgtcgcgacagaagatgacccagagctttgccaacactcgtcttgtccggcatgcggtttctaaattgatagaaacgtatggttaacaaatacaaatctacattgcaaacatgcactagtacttcacgaattagagacccctcaggtaatgactattatcagctaaggattcggcattcatgcggtttgtagattacaatgacatttgcattggcggtcgccatagacatagaagacataaatgtgccacttgataaccttgcctgagaagccccgggtccttcaaatgattcattccattggcatataggttttaaagtactagaaccagccctgggaggagcgatgctgctggttctcgatccagtcgttttgtttgatcggatacggtcgattgacagaataatcttgtcttgcggtcgtgcgtgttgtggttgcctggtgtctggaggcgaaaattgttcaagttattttacaactttctggcgaagaaagaaacggatatttttgtgggtatcatgtagatggtcgcaatagcgacagacgattggataaattgtttcaagttgctcatttttcgggggcatcgggaagtcgttcaataacatatttgccgcgagcgacactcatgatgggtgctccaggaatcttgctattatggttgttagaatttggctggtacagcgaaaatgagatcgatgtgtaggttacataccgaatccgtctcttaagatcacgatcgtttgtggcgataatgtagacacgatgtttgatgacacgatcgaccagacagtcatcggcatatgttcccttgtggtcacacttgacgcgctcgaaccgagggtctttggctacacgcagtgcaagtcggtatttcgggccaagcttctccaactcggcaagtacgcaatctgtgacgataggaatacatttggcgtacaaacagtcaagcatggtaggaatgacctcaagtttgtgctgaatggtgtgggaaatgaaattggtatcgaccagcacggagtatgggggagcgagggccgtgttgaactggaagaacattgacgaaggagcttgggggctaagagcgaacttgtcagtacgattattgcgatagtactatatgatgcacttacgcctccttgacgaggtcatccttcttagcctcttgacctttctctgtcttgtcttgattttgcttcctataaccgactgttagcaagtcgcaagaagatcatgtttcgtgattatgacgaacaggcgattgtcgcgcatggtaatggctctcttggccagcgcatacttgcgagtctttttctgaactcccatgatgacgagatgtggatgataatagtgaggaagaggttttttttctcttttcttatcggggaaatctatctcgggttcgggatgactaatcgtgtcgatgggctctgggcatcccccacggacaatcttgtcttcaaaactcccgtgtactcagcaataacctcaaacattcattatgtcgggagcggattcggactttgatctgtcgaaggtaagtccctacctcggcgttcgcaagcaacatatatttccctaaactatgctgctagacagcgttgtccctgttgcattccattccctctaccaacgatccaaggtcggacagctaatccaatatataggcacttgcagaacttgcaaagtacgtgagaccacttatagcttacatcaataaattcatgagattgacatcatatatttaggggtgaaatgactgcctcggccctggaaaaccatctgagcgcaattgaaagccaagtcgatgaactcttggcatctttcgaaaagcaggcggctgctgcagtggaggctacgtctgtcgatgaaacagacccgagtcaaccggaaacagatcaggatcaaaaagtagagccatcgaatagtccagccaagtgaaacttgccatcgcctaacttctctgcaactccaacctctgtgataatcccatctatcaaactcgcgggagtaatgtcaaatgccgggttccagacattgatccctggcgcagcaattttcacggtctcaatcacaatctggtcggtggcctcagaacccgcacggggacctttaatgctggtcacttcagatgctgcacgttgctcaatgacaatgtctctccctgatttcgttgccatatcgattgttgtgagcggcgctgcaacgaggaacttaacgccatggtactttgccaagacagcgagaccatatgtgccaatcttgttggctgtgtcaccatttgctgctaccctatcagctcccaccacaattgcattcactctcactttggtatctgcgagcaaagcggctgccatggaatccgtgatgagtgtagccggaatttcgtcgtgaaccaactcgaatgctgtaaggcgagacccttggttgtagggcctggtctctgtgcaataagcgtgagttaggaggctcttctcggccagcgaacgaaccacacccaatgcggtgccatatccagaagtggcgagagagctagtgattcgggattagtgagaacatacgacggataacggataatgtagcgaatcggccttacccagtgttgcagtgggtcaatacagtaatcattgaattccctctggacgcacgaacggcgatccattctgcgccattgtgtccaattttcttgttatcctcgaggtcttttcccatcatatcctctgccgcctgaataaaggcggccccggcctcccgggccggannnnnnnnnnnnnnnnnnnnnnnnnnnnnnnnnnnnnnnnnnnnnnnnnnnnnnnnnnnnnnnnnnnnnnnnnnnnnnnnnnnnnnnnnnnnnnnnnnnnnnnnnnnnnnnnnnnnnnnnnnnnnnnnnnnnnnnnnnnnnnnnnnnnnnnnnnnnngttttctttccccgccaccccccccgccgcaaaaaaagggggggccgcgacttcgcggccagtagagcccggtgctttcgtgcggttgaccactacagcctccagcttgcgcgcagcatcagcgagattgacggcagtcggcctactcgtcaccagataagcaagcttctctgtgatatattggcacacctcttctggtgattgtgaaagcttgtcgctgtccacagcagaggttagctccgaagcgagagcaagcattgcgacgatcgcaatagcaggtgcccctcggactttcatatctttgatggcgtgccatccatcttctgtagtccggatgggaatgtattcttcgacaaatggaagctgcaattgatccaggatctcaaggttgcccttgctatacttgattgcctgtaacatcttcgtaggtgacggtcaaaggttttaaagaccttggtgaggcgcgaagaaagaaccttaaaaagtccgcgggggactttggaaagcttacttaagcaatgcggggggtaactaactacaacaggtacaatagttaagaggtacaaccttcccaggaacgaggaacgtacctctaacgtatgtagttaaggtaaccaagccaggtaggatcaaatgccatggattactgtgcgaatatactctgcaccgattaaacatgaggtcaatggcacatcgccacatcgccagaaaacttatcaagccgcctaggaaacaaataacgagctcatggtcaccagcgccaatgttgagctcaatacaaagcaggggaaaaaaacccccctaggtacgtagccttcataaccctaggctcgcaagtatggccaactgcatcataagaagagttggtcaatcaccacctaggcttatattctgtcctcctagctagaatgttccaaatcattgcgacgacactcaaatggtgtctttcttatccacttgcaggttgtcataggtgggcccaatcgataacatcgaatgtgtattgtgggatcagctggaagagatgtagagtactgtaggctctagtcagaaagctgtcgcactagccataggattggaagacaagaaaggattgacaaaccgttgtttccgcgcacgaaagcatccccgtagtttcgtcgtagttttccattcacgtattcttcagtcttttcaagggcaatgttcatgtagccatcaactgattgcagttcacctattggcgcattagaagcgaggccactaggaacaagagaaaagtccatacccttgtataccactccagaattcagcttcacgatcacaggcgcaccgatgatctcactcagaaagacagaagggtctttcccttcagaggttgcggcgttctccatattgatactgtggtctgaactttatcaaatgtcagccagagctaagttccatgggaaaagggaagacgtaccaggttgagatgtgttttgaagcagacggagggacgaagcattcgaaagcaagagaccagtaaggcggtgagtgatgcactatcacaagcggggcgggatctgctgatcagttttcgaagaagatcggacaccgccattgtattttgccggtattgccggtcataaaatagtatactttctattcgctttgcaaacatcatccaaaatattgaaatagttgaatttggcaaactatgtgctagcatagctatttgaggctaatctgtaactaataaatcaagaggaaagaggtcttatatagtcaaatattccgttaatcagaaagcatgctagtgtacctttattaggcggtaagcaggacggtgtcttgacccactataggctagaaagtgtgatagcatgttccctccatcttgactaccaattgtttggcttatgcccggccctcgtgtcgcacatcttactctatcactaacatatcgctgattataataaggtgcttcccgagtcacttctaaaatccattcggccatcctaccatacttggatcttttgagggactcatgagctttttcaaaaagccctcatgggcaataaagaatatggaggaaactggcactgaattttatcgacgctcagaacaaacgtactctgatatcattgctgcgaatcgtgaagcacgccacaagccgaaatcaccggagatcccagaacataccgaagatactcaagataccggggatattgaagactcaaaacgaaagaggcggcgtcggcactctagtgaaaggggaaaggggcgcaatgatagcagtccggtgcaaaatgtggcccgtgaggttgataaacttgtgctaccggagccacaagagctctcgggttcctcgcatgattcctcacccgaatcagtcaagccagtcaaacaaagcgaaccaacacagaaaagcagcccaggaaagcgcttgtcccagtcaccgcacaaagtcagtggtccggaaccactaggtgctctgcctgttcaaccagtgattgtcctagcggatgattcggaaactcgaacccctcgacctgttgaacctcctaggcctgttcaaccttcacctcggcctgttcaaccggcggaagttccagcggatgacccgattgtccaaatcatgatcacatccgaaattgcgaacaccaaaccattactcgtccatcgaaaaatgtcacagcggctcagggatgtgcggttggcatggtgcagtcgccaaaatttcgaaccccatatacaggcatcaatctacctgacctggaagggccgacgtctattcgacgtgacaacttgcaggagtctaaatataaataccaggaagaactctgcagcgatccctggcattgatgatgacgactttgcagaccagaaagagctgcgcatacatatggaagcggttaccgatttacctctcccggtcaatcagcaaattacctcgcctgataatgaaaagccccctacagcgtcacagtccccaggagctgaccagggcgagccaatgaaacttattttgaggagtcttgaacacgacgatttcagaatcaaagcaaggtcgaaaaccctgatctcgcgacttatatcggctttccgggagaaacagaatattcctgtggacaacgacatctttctcttgtttgatggggacaaactcgatcccaattcatgtcttggcgactacgacattgacgatctagatctgctggatgtccaaatcaaataaccctcctcgaaggatctgaacaactgaataatagctaatccgggctaatcaaagctaataaaatcttccagtctgactctagggaatttctgtaaagataatgtatatacggagcacaatttcagagtaaacatcaacttagtatagtagtggacctatccatatcgatcacatgatatcagataagccgtgggactctttttttttctccctcggaggggccatcgacgatgttcattatccgctaaattaatctcctgtctagacccaatcgatctttacatacctgagcaacattctcagaatattcgcatcgacaaaccaccaacaatcaccctccaaaacccccacaatgaaagtgatcaccgccaatttcgtgacatgcgccgtgaaggaatgcaagacatccccggcctcattcccattacatttccaagacgccgagctcgagcaacaagaactagacttccagcccgaattcatccgcaacgttctcccccgaattgactgggaagccctgcgcaccgtttccaacgaggtatgaagatccgacacccaagtttacctattcaaccgatatacctatacatacgtgtaggtaattcaccgacaattacaaataagctgactcttgcggtcttatttcagcttggattcccgagtcttccagattcgaaacctgagggcgaggctctcgacaacgagcagacattgaaggacttgcatcggttgcttcttgagacgcatgtcacggaagggaaattgacctgtgggaactgtggtcattcatatatgattaaggagggaattgcgaacttccttcttccaagccaccttggtgagaaatcttcttttcccttgggtatgttcgtttgctaatattcctccagtctgaacgacacaatcccacatgcgcttttcaccaaaatagcttcgcaaatcgataccccaggactaggaatggtcttccttcctttcctttcccttctctgaaagaccctatgcagtggcacgaaggttatcagatatccaaatcgggttcttctgggatttgacacatctacgctctcacatctcctaagactgtgctccagcgccatgacttgaaacggaaaacaggcgaaattcttttggaattggtatattgtacaagagagttcgtagtttatgaaatcacgattgccattgataaatgcgtcaatgctcccacactgaaaacgccagcccgattcaacgccgcccggtaaatgggagtcaatatacctcccaaagactttggtagatagatctcggaaagcgttttttaattaaggaatcccttgcagcccgttgaaccacagagacaggggatgcggtcatcgctgtcccactctctctcgaatttgtagtcgtacgttaactcctcatctaatagcttttgttagcatttgtcttttcctgcaaagcccgcgcgggtcacaaacctctttcaatatccctgagcgcataaatcacaatccgtttgctaccatctaccttaatgatcttggcggtgcagtttggtgtacagctgtgattgatgaatcgcgcaattcctcctctctttgtggcatcgatgacggtattctcgtcgattcggaaaagataactgctgccgatcccgctctttaggtatcgtctttctctcatgtcggcgacctgctgacgcactttctctccgacgtactcaatgatcatgtcattggcagtgatgttttcttcggcatacaagccccaattatgaatggcagagcgagcgaagcgcacaggcttcttgcgtttcttaagctgattgaatcgaagaacgtctccttcgccgttcgcggtgggaagggcctgcttttgtgcattgatgtctgcaatgagccggcggttgttgactcgggttgaccgggatgtcgattttgagattgttttggcggctgcaatcctggcagcctcagctgccgctgcctgggggtctgctttggcatttgcttcacgctcttctcgagccttctgaaccttgatccgatggggcaggtatttggatttttctgcctcgagaatcctttttcggccttccgtccgcgcagcgcctgtggtatttggcacataatagccagggatactgatagcgtcctgggtcgtaccagtttccaggccattgagagctttgatctccttttgtttccaaccccatgcagcaagattttggataattgattctgactgatccagtaggatttcccgcaaaaatcgcaggtcttcatcatccttgaccaggttttgccaaccatccaaatcaagcacgatgttttcatcatcttccaccgtggcgcggggctcatccttggaaactgcccattcgatctctgttctcggctcatcgataggttcggccttccccgtttcgctgatcgagaggtcatcatcctcgggatgtttgtaggggacattctcggtgaattggtctgcgggttgatcgtgcgttggtaatttgtcgtcatcctctgcgaggtcgtcatcaatagccgcgggcgtttctagctcctcagtcgcatcctcatatccgagtatttccgagtcaatgccaaacagctcttcctcctgtcgctgccgctttcgtgcttcttcctcttctgtcagtcgctttctcttgcctgacgtgggagacacctgaagttcgtgggaaagatcgctggtttcatttgtggcatccaggtcgtccgcaagttgagcgctgcgtgatgatcccagatcatccgactggtatcccccatcccgttcaaactccgatgacgttgaactttcgcgactagggggacggctctctcgctcatcggcatccctagtagcaggagtgcgctgctcgtcgtccgaatcttcatcatcgtgcagctgctgtaaacgatgatataagggccggacttctttctttcgaagcggttgcctacgccgttcgtctaggaaggcagcacccgcatggtcaagaccatgggctttacggatacgaggaagagcaaggacattcagacctgatgatctgaggggatctcgcccggcggacatttcgcctcgagagccaggggtgctgtcgatttggaaaacagatcgctttgtaccctcggggtctgaaatacccagcctttcccttttagccgcatgtttactcggttccaaatagtcgtaaagagccggagcagctatgcgtgacttcacatcctcgaggagcttgtccctcaagtcacgaatgatgatagacaatacttctcggcaaggatctaaatcaagcgcccgctgctttttttcttcttcaagatccaattcatcctctttctttgtccgatctttttcggccttgtttcgttgttcggtgcgaagtcgttcggggctgggactccgttcgtagtttggattcccgtagggctggctctccatattcatgatgtaggtgaacaagggttgcatgtgacattgtcggtagcagcgttcagtttcctcctcgccccggcgcgagttctcgaagatgatatagtagccggttttgtcacaacggatatgcttgtatccaaagagtctgagtctctttctcaggtgcggaaccgttgtgctgagaactgggacataacaatgcgcaatgaaaatgtatggatcgcgtttgatctgattcaagataggagtttcttcgaccaatgattgtatgacaggggatcgtgcagcggccctaggaccctctgggataacgagccccggccgtagggatgatctgcccgagggacctttgggcgcagtcggtggtggttcgcttttctttatctggacatccggtctcggttcgattgcgggaggaaggctaatcttggaagcctgtcgctgggactcgactgctttcgcggccattcgatttgagacaaccccgtcgcgatccagctccaccctaatcctgcgcgtgccaatgcgttgttcttttttgcattcgaaatatgcacgtcgggctgcgctagatgctgacgctgacccatttccccgagctgaggtgctatctttgtatttgatggagcagatccccagaaaccggccggtgatggggtctgtgcggtttttgatttcggccacatctccaaagctcgagaaaagtgcgctgatcggggcaatcggggtcaaagggtcgaatcccgtcaccacgacctgaatcggaggcccgggaccaatgctggttgccacatcgtatgaccatggtcgcagattgtaaggcgcgggtcggtattttgtcttctgcttgcagccggatccacgggtataattggcaatcgcacgacgaggatcgggtgcgggatcggcttggccattattcacgatgtccacatactcgagctttttccgcttttcctttgacgaggtccgcttgtccagatcggggtcgtagacaaccttgcagcctgtcacacggagctcgacgtgtcgagtttgcgactgaggggtaggaggggtgtctattggggtgatggaaggtttggtgacatcaggattcggcctggaagaagtgcccggagagcctccgcctggtatctttggctgtgatggactggttactttgcaaaggggcgatgactccgcattggtgagcggtgtcagcgtatcgattggtgggacgtgatttgccgtgggtggtggaggtagcccaatcctatcctctgcgcttttcgccttggcgaaaatggtcaatccaagctcgttgggaaccgatggagtgcgagctcccccctcgtctgtatcaattttgacgggcgtctcaacgggcgcgggggtgctcgaggcaagagacactagacgatccggagtcttttcggaaatttgatcaccctcgacatgtaatttccggcgttcctgcgctgttttgaagcgcttctgttgaaggacagatggtgcggtggggaagaagtctgcaaagccggccgaggcgcgtgacatagtgagaggttggctacacgccagagaccgtggcgcgatcagaaggcagcatccttgacagtcgtgatccggctattgcgaacacatgcgaccgagaaggtcccggcacggcagaattgaggaaattgagatgaaggggcttttacagaagtgccaatgtcaaagaagggatgagaaaacaaaagagatgacaagaaaaagggagaccgaaaagcgatatccaggagctgttgaatctgcggaggtgccgttacgcgcaactcaagagtttgcaggaggctaagacgcgatcgagcggaaggaagtggaatggtggggacgcgggagtttgaacttcacgctttcaagggatatgaactcctgtaaggaaagaaagaaaaggacgtgaaatagatcgaatatgattaggtatgatgtggtgaagttcaagttcaagttccccgggggccgtttagtgactgaatgattcagcaattcttttttttttggccttgaaaggatccccagtgacctcaccgcgacttaataactcactacaataacgcccacagttgaggtacctagtaagtatctttgggcactcattggggaaatcattgatctttcattatcttattgctattggagatgattgttaatagtagccttggtattgatctcgtcaataggttgtactaaaaacaagcccaaaattcatgtcttgaatggttccatagtctgataataggggattcttgcttgcaccctcacaaccccccctgcctgaaatttcagtaccgccttcctaatttggttgagcatctgcctcgacactttgcttctgcataccgctctcctcaccgcctcctcatatctacgccgcttttgtatcaaactgcataggatagtagcaagacagcaggtacgtatggtttgtatgtaaactcctaataaaattcagtcactcatacatgtaagccagaagtgggcagaatacgtagctgaaaaaataaattatggcagaaatatggcagaattctgagtggtacctgatcaggaaggcggtccagggatttcatgcgagcaacaattcccgatatatatacggagtacgtttgaacatgtatcggattcgaatatagagtagtatacataatacaacatatatccctgcgtatgtctcggactttgccgcttttattagggtcatcctacctcttcttccgcctacgaacagagaaagcggtgagaggtgaccctaaaattaagcatggctcccccacccaactttctcccttcaaccagtcacactcatccatcatcaacgaattgcacgcatccatcatcaactagtcgcgctcatccactgtcacagctgattcggacgccgtacttttactggaactgccacaccctccagactgggcccaagcgcactccaacctgaccccaagcgcacttcaacctaggtaattgacagaatgtcattatctatgacagtaagtccttctgtgccttctagtattttcgatactaataatcaagctaggagctgaatcgaaagttgaatggttacgtaccacttaagcctacggacagaaccaagtactttctccgtgacttttataagacccttcctcctgatggaaaagaaaatctggcgcaggatatttcagggtgtgaaaacgatgagacacttcggcaactcgtccaaagtattcggactggtttgctggttcccttgaaagcacagggtggtaaaacacccactgaaatcactccgtctccgcgttctggtattgaagattcaatcgaggatcttaagagccaaaacatcgaacctattagcagaagttatcagtcgcaactccggaaccactgtttagaaagagatggtaataaatgtcttgcaacggggatgtacagtcaggcccatgcctacccaccgaacgtacttacgacctcccttgaagcagctcatattattccatttgcatttggatcctttcaggccaataacagcgagtcagtggatcgaaatacgaagatctgggtcaacctaagacgctacttcccagctcttcgtaacatgtccttcaccccagaacagattaattcagaaaagaatatcctaatgctagacgccgaaattcataaggaattcggacaattcagaattatctttgaagcgaccggagttactcatcaatatcggatcaagaccttttcgggcatcagcacaaggacattgagagatttacctcaaagtcggcttgtctatttcacagttcataatggaagttgggaacttccagatcctcaaattctcgaaatgcatgcttgcattggaaaattcctacatatgagtggccaggcggaggtgatcgacaagatcctagaagattttgcagactgtggtgggcttgccccgagtggaagcaccaatatcgcagaccttcttgcagtgagctgcctcgcagtcctatgttgaagtcgttcaacttttcagtcacaatccacttgcttcattgtgtactcccaatgccggtctcccaccgattctccttgtctgcctcggtcttaccacgagagaagaattccgttaatattgatacttgttcatcctcaatttcgatgttatttttaatggcggacaccagagacgtgacatgctacatttgatgaagaaccatttgcccaaccgaggtggaaagcaaaacagttatttgtacttcctccttttacacatcaagtacacctaagatctccattatgaccagataaatcctatcctatcttccccaatcaattctatgtccgtgctttgacagccatccaacgggcctagtctctcttggaagcagaatctagagctcccagatctgcgtcctctactccgtatatagagaacaaacccacatctagacggcaaacggtcatccggggaaagcgttatctatacagtggtcgaaggaatatgaattcagatagggcttgcgttatatattatgacttcaggggaaatctaggcgctcggtccatgtggacagttccacgaaagatacagaagtggatggctgatggagtagaataaatgtccacttcgccgagagaaatggctttagtcgataggcgtatagaggcatatatcattgtttttcgtggaggggtattttgcagccgagagacatataactacatatggtttcatgtagaaggcatgttgtcagaagtacataaacagatcttcaatgcactgcaatgtggcgggagaggaaaacgaggtggagttcagggaagacgaggaagatgcttccatatccaatcatgtacctaggtcatcgaagtcggaagagatcttctggtgggcccatagtgccctcaagccgactgcaagactgagctgtacggagtagttagttagtctttatcatgagccaattcccgttttttcttggactggatattgaactcgtcaaattggaagggctttacaggcataagttataatcaaaaattattccaattttcaaagagagccaacttttttgcggttccaaggtcggatataccgccacattatgtaagacgccagccagcctccgttacaacacagttaactaaggatgttagtatgaactagcgtgtggtgagcactatgtcaaagttccaggctaatctcggacttagtgagtgagccctgtcatagaaatccatggaacgattggaaccaacgagaatattcgttgaggagagatgcttgaggagaataataccccataccgcgcttatggggacttccaaatccgggtgcccgagtatcaggtgattccctacgtccatggatcatcgtcagtgagcccggcgagttcaaggcttatgtaagaatcaggggtctcagcaaggggaaggggaagcgaaaaccggaatatgcacaacgatgtaattaaatatgtatggagtagatatgatgttatggcggggaatatagttatcattcaagcctcctagtactatttacatagttatagcactgcatcagccctgcctcttttttttttctcctcgcttgtatgaggctgatatctcagcttatccacatcaacctacggagtacttcgtataaagtagcgtagtgggtagtccctctcagccgccgttgtgtatgaaccgaagaaatatatctgaaccgggcaattaattgcgagggaccaatcgtacatgtgtatatgcagttggcgagaccgagccaaggggtatttttgcataaaaacaattaaaatcggtaaaacagcaactgcaaaggcgtggaacgtctgtcgaacctttccaaggttctttttttctcaggggatcctcccactaaggaatgcgccgggccactaaaagatataattagagattttcccccgtatgttttttttttgggactttcaaagctccgccactgctttgcttcgcctgctagctccgatctagcgtgaatatacggcgaagatcagaccgatataggaccccggcactaccaatatagaccccgggactcagattgccaagaaaaggagaaaaaaaaaaggtactatttatttacttgctattattaacaccaacgtcaatggaaatatttaatatttatttttaacaatgttcacgaaataaacatcaaataatatgccaagtgagacattcgattcccctaacaaccagcattggcccgagcattctcctcattggacgaaagcttgcacaaagtgaaagagctaataataatccgcccctccccctaccctctctgttcttgcccccctctacaacttataaatacgaaactcctgtgccttctttgcatctttctatcttgtctcctctctctgctgcttttaattccccctgacaatctttattctctcactaccattgtctttgcattcactttttgcttttgcccatcatgtggtaagctctggtctaccatccatggttgaagtatccatgctcacagttcttagtggaatcttcggctacatcaactacctcgtggagaaggaccgcaggttcatcattgacacactgcttaatggtgagtcgccaagtgtgattcaatgattttagccttttgctcaccgttatttccccaggcctctccaggttggaataccgtggctacgactcggctggtttggccgtcgatggcaacaagaaaaatgaagtctgcgcattcaaggaagtcggcaaggtggccaagttgaaggaactcatcgatcagagcacatatgacatgaccaagaccttcgagtctcatgctggtatctctcacacccgttgggctactcacggtaccccttcccgccagaactgccacccccaccggtaagtcccagaaaacaccccccccggatgatggagagaagatagagaagctaattggatggtcgaacagttctgatcccacctgggagttctccgtcgtgcacaacggtatcatcaccaactataaggaattgaaggctctgctagagagcaagggtttccgcttcgagaccgagaccgataccgagtgcattgccaagctcgccaagtacctttacgaccaacaccccgacatcgaattcacagtcctcgccaaggccgtcatcaaagagcttgagggtgccttcggtttgctgctcaagtcggtccactacccccatgaggttattgcggcccgtaagggttcgcccctagtcatcggtgtcaagacctccaagaagatgaaggtggattttgtcgatgttgaatactcggaagaaggtgtcctttccgcggagcaggcctcccagaatgcggccgccaagaagtctgccacaagcctccttgccccccccgacaagtcactgttgcaccgctcccagtcgcgggcattcctgtccgatgatggcatcccccagcccgtggagttcttcttgtcttctgacccatctgccattgtggagcacaccaagaaggtgctctacctggaggatgacgatatcgctcacatccacgagggacaactcaacatccaccgtctgaccaaggatgatggcacctccaacgtccgtgccatccagaccattgagctcgaattgcaggagatcatgaagggcaagttcgatcacttcatgcagaaggagatcttcgagcagcccgagtctgtcgtcaacactatgagaggtcgtctggatgtagccaacaagaaggtcaccctcggtggtctccgccagtacatctcgaccattcgtcgctgccggcgaatcatcttcattgcctgcggaacgagctaccactcatgcatggctgtgcgtggtatcttcgaagagctcactgagattccgatcgcagtcgagctcgcctccgacttcctcgaccgacaggccccagtcttccgtgatgacacctgtgtgtttgtctctcaatctggagagaccgctgattccctgatggctcttcgctactgtctggaacgtggcgctctgaccgtcggttgtgtcaacgttgtcggatcttccatctctctcctcacccactgcggtgtgcacattaatgctggtcccgagatcggtgtggcctcgaccaaggcatacacttctcagtttgttgccatggtcatgttcgctttgtcgctgagtgaggatcgtgcctctaagcaggaccgacgtgaggagatcatggagggtcttggacagatctccgagcagttcaaggagatcttgaaactcaacgaccccatcaaggagctgtgtgccaagttcttcaagaaccagaaaagtttgctgctgttgggccgtggtgctcaattccccactgctcttgagggtgctttgaagatcaaggaaatctcatacctccactgcgaggccgtcatgtccggcgaactgaagcacggtgttttggctcttgttgacgagaaccttcccattatcatgatcctcacccgtgacagactcttcactaagtccttgaacgcctaccagcaggtcattgctcgtggtggtcgcccaattgtcatctgcaacgaagacgaccccgagttctccgatgccctgaccgagaagatcaacgtccccaagactgtggattgtcttcagggtctgctcaatgtgatcccattgcagctgatatcttactggcttgccgttggcgagggattgaatgtcgatttccctcgtaacctggctaagtcggtcactgtcgagtaaatgtttctttagggcaaggttagacgattcttatgatccggtcatctttttatttttaggtgttttcagcttcgggacaatggaatctcgttttgttttttcaatcatctttctttgaatccaatgcctattagtattttttagttaagaatcagtgtccagctttataaaccgaattgaccgtagaagcattccacaggccaattgcgctcaattgccgtgggtgatgacattccgccttcccccgccaaatgcgggaccgagggatttcgcccctcgagcctcgagctctgattcctaaacacttgtgtcaagctcaattcttccaatcttcaggaaacaacatcatctttctcggacgcccctctcaacaaaaatgactaccatcaaaggccccggcgcagcccagacccacgatggtaaaaccgaacaacagcccttggagaaacacccccagctaataccgattccaccacaggctccggactccgcgtggcgatcgtgcacgccagatggaacacagtgatcattgaccagctggtatcgggagcgaagaagaacttgctcgctgccggcgtgctgccggagaacatcacagtccagacagttcctggtagctacgagctgccgcttgcggtgcaacggtgagtgcggggatgatatctcacacatgacattgtatactgtatacgactgcatactttatagtatactgtatactatgcgctgtagtgctgtgtgctgtgtgcttgctgtatctgcccgtgatagcgttgactaacactacttgacatccagcctctacgccgcatcccagctccaggccaactcctcctccacgcagggcaccagcgccacggacctcctgtcctcgccaacagccgaagtatccggctcgaccaacttcgccagcccgaagaaacccttcgatgcgatcatcgccatcggcgtgctcatcaagggcgcaaccatgcacttcgaatacatcgccgacgccgtcagccagggactcatgcgtgtgcagcttgattcgggtgtccctgttatctttggcttgcttactgttttgacggagcagcagggattggagcgtgctgggcttgggaatggtcatatgcataaccatggtgaggactggggaagtgcggctgtggaattgggtcttaagcgcaaggagtgggctgagggtaagattttgtagaggtactttggaagagaggctgggggctacgatgggaccctctgatatatttggtgtggctttttggaacctgaataacataacttggtccgttgtgggagattgtttttggagtaagaaagggaacatctttcacagaaccataattcttggggagcataatctattacatgttcactcttccatctgttcgccttgacccttgtcctcctcttcttcgtcatccccttccaaagaccgctttgctgctttctctgcttcctcgaggagctccttgggcacttcctcgtggcggcccttggtcggtccgtcgaccgagctgatccacgtcatctcgagctcgaagtccttgtccttgctgtcctcgtgggagacatagataatgcgggcagcttccttcacgccatctagcaaagacagattgcccgaggtcaggtctagtttctcgagttcggctttggcggcctgtcgtccctttccagtagcagcaccgtagtagccctataaatacttgtcagcatattcaaacacccacacagcaaacaagtcgcaacgtacccaatacagtccactaggctcgatcatgtataggccagggcctccagccttggcaccctcgatctttccaccggagccagacttgggtccattgccgacctgtccatcaactggaagctccgcctcggtatcccagccaccaacaatagcagttacaccgaagggccgtacactggagtaaagagtgtaggcctgaacatacccacccaagcgattggccagcgcagcggtcggaatgggacctttgtatgtgcctctccaggaggaagcttcatctctagctctggaaacaaagtgacggccgtcggggacgagtccagcggatacctgtggtagaaagaagacagattagcaacggatacttgaagccttccctggtagcatgcttttgataaaaacgtatttcgtcggggagaggcgacagggagaaagggaagtaggtctcacaattccgacatggcgatcgactgttgcgattctcttgttcgcgcctggctttaggagcttgctagtgatgatcttctccactgccaacactacaccatcattgcatctgatgccgatagcggtacctccgttctcaactgccttgacggcatattcaacctagatggtatggtcagccgaagctgttccgtggctcattcatgagctgggttgtgtttggttacctggaaattccggccgtctggcgagaacaccgagttggagagatcgtagcctgtgccgattgacgtctaaataatcactctgttagcttgatcgggatacagcatagtacattgtgtggatccgaagctgactgaccatgattttggtgaggatgcgatgcggtgaggttcaaggacaatagacgtcaccgtgggtaggccgggggatcgaaagaggtaatctgtattggacagataagggaggagaatggccggtttggagggagactatggataggtagggtgaggttggaagctctggggatgataacggaggttcctaggctaagcagtgacgctgtcgcgtcacggggttgcctggcagagcttccagtcacatgaccatggggtacctaattggtactttgatttgtatgtcttctctacaagcttttggagtactacttcagtaccttgtagtattggatgtattggatgtatcatggacacagcgcgaacacactgtgggcatatatggacccattatggatcgattacaggcataaaatgcagtataacatttgagcatctcctactggccctcggactgcagcccaaccgagcaagcacttgggcatctttgcccctcgatctaaacaaaagacacaaactctctgaatcctttctcgtattcagttttagagggaaaaacttctgaatcgattctgccattttcccattttcccattcattcggatatcgtcgagctatacagaaatctacccctccatgtcctcctcgatactacatcagtgcccgcactgcgggcacgtctccgatatctcaaatgcgctcacagccttcatcgagaaccctcactgtaaacaggtagatggtgctcgctcttacatgttatgccaaggaacctgacccaggggcatatatatatctagtgcggcatgtctgcttccgaaggcgagtcgaaagtgcaagacgaactttcagctctgttcgatagacaaatgagtatgacacagctgcagcccgcccctagagaaactgtcgtaccacctcaagcgccacaaattgcatacagcattacccaacactaccaccactcggcccacagagtcgcccagcacacaaaccagccccagcacacaaaccagccttcaagcgttgatgttctgagacatcacggtcttgatccaaatgcccttaccccggaccagcttatgctcttcgagaacgccgaagcggaacagagagaacgattgattcaaacatggcggctctactcgcagtttgggaatgaagccgccactgccggggactttgctatgcatgattctgctatggaccacagtgaagatgggaatgcctatgctgatgctgaaccctacatggtgtcgggctacgggaacgttgccaatcaagcctctcatatcccgaaagagcctaccactggtgaatcatatgctggctcaaaggacccggtgtatcaaggtcagcaatggtgggagttgacaaaagccggtccgatggagtcgaactatggcgcatttgaagagatgagacgatattaccccagctgtggtgtataccaccattagttctgttaaaatagatctattggaacgaatttcttttgtaagtatcatattattgttatccttgcctctacatgccctaactagcataaacacttaccaattagctatccaattactccctcggtcgaagggatatataccaaatttaggtcacccgagttaaccggtactttttgtcttttggaattctgatttggaatgttatttgagaggagatggaattatttggttctagatacatatttatttgcgtagtgatccatcaaccctcacaattcaagtgctgatttaatcagaaaccaatgccacctgggcatgaccaacggtgaatataaaggagtgttcgccattggcatttcataaaccaatccatcttaactatgccaattggcttccaaaagctctcataccgaaaagtaatcgacggtgttgtgcatatcgataattgaaaagagagctatcgagcaatctctatcgatgttgcagcaccacggaattcattgtataggagacactgggaaaagtcagtaattgaatccatgcacaggacagatggaactgtatcatacctttactcctcttcctcttcctcgagggcagccatggcataagcgagagcgtcggcggtacgcttgacctcatcgacggcatcggcggcacgcttggccttgtagcagccctggccaatgtggccacaccacttctgaagaacaaggggcagattcttggccatggcctcggcgagagcatcggcagagcgcttgacatcgacggaggcatcggtggtccgcttgcagccctggccgatgtggccacaccacttggggagagttgtttgaggagtagcggcagcctggacggtgccagcggcgagaaccgcgatgacgacggaggtgaacttcatcttgatggttgaaggagaaacgggggtttgaaattgaaagttggtttgaggagcgaaagacagatactgagatagctcgatgatggagatgtctggagaaaagaaagcagaacgaggaacagccaggtttatatattcttaaagatcaggatcatcgttggctcaatagtagtctcgttattgagaagagcatgttgggccggagttcggagattcctttactctgaatagagacacggccctgaatagagctctttgtcaaggaacattaacccaaatagaggcactgctcgagatcggcactgtttgatccaccgtgaatagggttcttattgacaacccttagcttgcctcctcaataaggaactctgtctcgtatagagggtccggggcaagccataatttggaatgctttgacaaacagatgggctgataagcccagtggattgaactagagtatattagttaagatggtagatatgttcttttgttcgagttgaccacttgacctgaggtatgtgatattcgaggaccagaagaggatctgaataagaattgaccaaagaaagttagttccggggaataagtgaataagaatgccaagctcatatgagatttcattgtttcattgtagctgtagtatgtctagtgtcgtgtaggtagtgtaggtagtgtaggagtggacatactgcccagcccaagtgatccattcagataagatcgggccggcgctaaccacaagtcgctcgatgccgagcccatccggagccttttctcccgttttcacgcttcccttttccaaccccctctcacttcgattcatacctcacccaatctctttgtttaaatatccaatcactcgaaaatgttctccagaaccgcacagcctgcacgggtaagttcctccctggttttgctttttctcggtttccgcgtttccgcgtttccgtgatctcagtcctttgcaagggagttagtggcagcttcgctaacctgtctctgctctctatagactctgctcagcagtgcttccgcagcttcatctgtcggccgctctgttcccgccagatgtacgcccattaaaattccctgacgtgcatcaaaatccatccccgctaacccatttacccagccttcgctagtgttcagtcggatatcttcaagcccaccaagtacggtggcaagtacaccgtgaccctcatccctggtatgcttcacatgttttgcgccttctccgctgtcatggcgcacgctcttgaactaacactcgacaaggtgacggtatcggtgctgaggttgccgaatcagtcaaaaccatcttcaaggctgacaacgttcccattgagtgggagcaggtcgacgttagcggtgtcgatgccggtaacaagcactccgaggagctcttccgcgagtccctggcttccctcaagcgcaacaagctcggcctaaagggtattctccacactcccattgagcgctcgggccaccagtccttcaacgttgccctgcgtcaggagttggacatctacgcctccatctctctgatcaagaacatccccggttacgagacccgccacaagaacgtcgacctctgcatcatccgtgagaacaccgagggtgagtactccggcctcgagcaccagtccgtcaacggagttgtcgagtccttgaagatcatcactcgcgccaagtctgagcgtatcgccaagttcgccttcagcttcgcccttgccaacaaccgcaagaaggttacctgcatccacaaggccaacatcatgaagttggccgatggtctcttccgcagcacattccacaaggtcgccgaggactaccccaccctggaggtgaacgacatgattgtggacaacgcttccatgcaggctgtgtcccgtccccagcagttcgacgttttggtcatgcccaacctttacggtggcattctgtccaacgttggcgctgccctcgttggtggacccggtgttgtccccggttgcagcatgggtcgtgacgttgctgtcttcgagcccggctgccgtcacgtcggccttgacatcaagggcaaggaccaggccaaccccagtgccatgatcctgtccggctccatgctcctgcgccacctcggtctcgatgaccacgccaaccgcatttccaaggctgtctacgatgttatcggtgaagggtgagtgaacgccaataccgttatgaaaaatgacaatgctgacttccttcttttagcaacgttatgacccgcgacatgggtggtcgtgctaccactcacgagttcacccgggctgttttggacaagatggaggcggctctgtaaattttggaacccccctcactccaatatacctaccgctacgattgaggatgttgcttgctgattcttgcattgtgctctgcacaccgtgaattggtcggtgtcgtcttcacttgatgtattatctttcctttcaatttagctcgacacgttccctcgcaagttatagcaatagactatttttcttttgttcataacgaggacattcattgcattattaattgggtataaacatcgtgaatcttcttcaataggccagtctcatatcgtgcccagaaggtagagagctcatcctccaagcctccaacccattgcgaggcctctagcaggcacctcacgatcgactaatttaacccgagtcgaacttgtaggtaccctatgggcttcccggcaagacaatccgaataacgcccaaaggaatgcgcatacacagacagaatgggtgaaagctatatacttcgggagaatgacttgaagactcctttcatccgggctttttctccttttctcctttttttcgtttctctttttgattggatccgacaaagacgaacatcggtgcccgtaaacaaagcagtccgatcagaaagcgattcgtcgtttgcggccggtgtatttcgagctagccttgacgaccttgcccttcttcgccatctgctcctttttgttcataatccaagccttgtctcccttcctcggaggtccacgggcattattgatctccgtagccttccgccgagcatccaagatattgacatcatccatgccattcacaacccccgtaatatcaccgggcagaccgccgccaccaacagtcagaaccaggtacaacttgctgctcttagtcccggggtcatcttcaaggatacccgcaccaaagccagctttgattgcagccccactgatcatactccgctggacatcattcttcgggtagaactgacacaccgcacgtccaccccgacgaagactagcgtacagaccttcgaagaagcgtcgcagtcgaccttcagcagtgacatcgctggtttccgcattgcacagccactggatcgcactgatgctgattgcggcgtcgaatgtgcccggccggaagggaactccctgaccgatatccgcgaggaatagatcgccttctacttcgcgttgtaaagccacgtccaacatgctgggtgaaatatccatgccgacccatgtgtgcgggccgccgtcttcgggctcgacttcggagagcatttcgccggagagtccggagccgcagccgagatcgaggatgaaggatggcgattttaggtcgaggagttccagtgcgcgactggtcatgctggcttggatgttgcgaattcgcgacgactttgtatactttcgagattcattgtcattgtagaacaggtccggagggctgtagttttcgagatgcgatgttagttttttttccttcttcatgatatatgcagcagagtcatgcggtcatacagggtatcttcagggcgcgacatggtgtgtggtattgaatgtgcaagttgcgttgcgagttgaagttcagaaattcattaaattatttttggtggcgctgcctgaggcatccgtaccccaaaaccgtccacgtttctccgattgcatctcgaatctctctctctggggctgattgcctcccgccttacttttcaacactatcagcgctcgacagctttgtatacactgcgcgtcatgtggattttaccgctagtcggatatttcggggtggttgtcgggtttgcgtttctcaccttggctataggtatgggacatggagtcctgacatgaatgggcaaaagctgacttggaaactccagcttcgggactctactatctatccgagctcgtggaagaacacacggttatcgcccgccgtctgttgacccgtttgatctacggcatcgtcgcgatacaagttctgcttatgatatttgaccgtttccccgtgtcactatctctgctcagcattggttcgcacatggtctacgctagcaatctgcgccgattccccatcgtgaaactatccgatcctcttttccttctatcctgccttctagttggtcttaaccactggctatggttccgccacttctcgaagcccttgcctccgtcgaacaactggcgtcaaccgtatggagtcaattacgatgagatgccctctttctctgaagtggcctcatactttgggctgtgcatttggcttgttccattcgccctgtttgttagtttgagcgcgggggaaaacgtgttgccaagcatgggctccgaatacgtcaccggggaacatgccaaacccgctggactcggtccctctggtagcaagtccaagaacaagggaatggccaaggccttggtggatggtgtccgagattggacaagggagaccggtgaagtcatgggtctctggagaggagaaagtacaagacgattctgagtgagcgaggccacgggaattgataatatatatatatgtaatgaaatttgtattccgccatcgcgtcgtgtaaattgtaataacaaattggcaaagtgcgccagcctccatatcgcgtaactctggaccaccaaatttccagataaataaaagcagataatgatatatggacatcgagccctaatggtagcgctgaaatatgggggaaagaaataaaaggcgaataataaggggaaatatgaagaaaaagatgaagtagataaagaagcagaacaaaaagaaggggtataacggtgaaagttgctggccatggcatgggaactcccagctccaagatggacagccgcatcttgattaccattatcattaaaacattccctcgcgactttgatgtctgagattgccaagtggattaagtcatcattgtgcagtcgtgcaagtcgtaatttttccgaataagagaggcatgaccactggacattccagaatcggaagggcgtggggaaaaaaaaagaaagaaaaggccagtgagaagcgaatgataattcacttgccctggtagaaagaaggatcttcatagacagtacagattagtaaagtccgtgggaatattctcgtgcttgggtcttaccctccataaagagcattgaactctcccgtcgcttggtctttgccgagcgagtgtcttccgagctagcccccaacatgccattcaaggaagaatacgaagcgccggcactctgatgttgatggtggtggtattgctcatgtctggaagacgtcggttggtcatagctaggttgcattggagtgaaaccagtgtcgtggtgtgtcctggggccatcggaaggaccgttgccatcaccaatgggtcggaacgaagtctgctggtacgaaggtgtagggaggtctgagaacatttgatgacgtggggaacgaatatcatcgggcgacagagtgttttcaactgtcagttccatagccggcctcgcaaagctcgaatcagtatcgccaaagatactgtcgtagtccgtgaggaacatcgagaagaccggtgccggaatattgagagttggggcaaagacaatgcccacgttcctgaccgtcatcttgttcacatcggaattgttcacaatctcgatcaagaattgcgatagagctcgtagcaatgcgagattgggtctaggcagcctatgcactagagagttgaaggcagcgaccttcttttgacggtcgtcaagttcttttcaatcaggttagtaaaaaaaaaaaagagaacaccaaatgtgtacataccgagaacgcgaaggaagtccaaatgaagctccctagttaagactgtcgtcggaagctctcgaagatattgcttgaagagagaagccacagcatgaatgtcgtaatactgatctccagacacgaaatcaacatcaccttcagtgttgaaacgttctttcaacgctttaatcaccacattggaaccgctcagacggaagataccttcctccaaggcagcttccttggcatggagatattcaatgcagcgataaaccactgccggcagccctgcatcaatgcctggcagtccgcaatcttgcacggcctctgccaagggtataccaaatacaggtctaacaggacccgtcctctcagcattgtggcctgatgtatcgccgctggcgtggttggcaaggtcgaaagaagacctggaccggaaaccccagatactacgtttcttctctttcgtcgatgtctttgctttgttgccccaagcctccaggtcttgaatgaccgtgccgtttgtgggcctagatatcaatctgggagactgcattgtttggtcgggagacatcgtcgtgtccttgaattctgtcgacaacgtcgtcgggattcgtggggaccggggagcttgctcaacactggaaccaatagtcggaggatcagctggcactgcatcctcaaagctgaaaccctgcacagagcctcctagatcctggtcgggactatcaactcgaccagatctcttgcttccgttgaatattttagacttggtctcggatccggagagtagttgcttttgctgcacgtgggattcatcttgagactgaggctgactcttggaagatacgctgccacgtccctcattttcggaagaagcattctcaacatattccatgagagcatcaacccacgtatcacgctcctcgtcgctctcggcgcagagaacatgccgaacaagtgccgaagaatccttcttctttggttccaataccagaaaggcatggcgatactggttatcagaatcatcctcggccccaggagatggaacattctcgttgggttttggcgattgcttgccgatctgggcatgatgaagtttaatagtacccatgtgcggaccaccgggagattcgtagtatctcagatcaggtccatcgagaacgaaatatctcgctttccagccaccgaagttcttgcctcgtttggtcaagtaaccttccttttgaggctttccgtctggtccacgtggcatgtcgggccttgtctgggcgagacctttcagcaaacttgtctcgtcgtctcgaggttctatggcatcacttgtcaaaaattggcagatagctagcgcggcattctcgtccattggcgtgtccaacagtctgtcaaagtacgcattcagtgcggcacgtctcaggtcaaccttagcaggggagtgtccgctgaaaatgctcctatccggtaattttccggaaaacggagaagattgtcggactttttgatccagctgtggtaaagcaccgatgaccttttcaactcgccatagctctgacatttctgaccgcaggatcacactgagagtaaaaacaggctcctcgtccaggggcctcgacgccatgtaactattccgggaaggtcgaagccgcgacgaagataccctgacttgaaccagaggaagggcattcggaggtaaaagcaggccctggtattcatcagacatcaaacctcggtagatttgattgtcggggaaatttgcagatctcgggctgtcaatcatgattgtgggatcaattaatggaataggaccacgtccggaagggatgggagcaaagcccgtgggatgattagccattcttggcgagagcggcaatccctgggcctgatacccggctgccatggaagtggaaaagtctcgtggcatgcgcggcatgggagaattaacgggtcgatcttctggcctcgggctcaagggcagtccagggctcaagggcatagcagcgatagagcgcccattgacggacgaagaaggagggggccgagagcccaaaagtgaccccagtgagttagaatcacccacatttggcggtgatctcgtagaatgctccctggggactgttctcgggctacatgttgctgtatcccgggagctctgagaggatgctgtctgaggcggttccacagagccggtagacccagacatatccttctccagcgcagcttcgcggtcctgatcatcctgctctctcgtctttctccgcccacgacccgcactcggaaggccatttacatcctgggaatcgccgtaatcggaaccggaatcggaatcggaagctgaagatgccctgtcattgtctgcttgtcgtagattcagaggcgcaggcggtggtttgcgatttgggtacggaatcctgttatttccgtctcctaccggagacgggatatcggcggcatagactgggcttctggtgtgttcgaagccctcccgccgagaggattcagaagctaggacaatcgatggttggtcaggtttgcgagacacattctctttgtcactgctcggtgcagtcacagacgccgagggctcggcaacgggcaatggcggagcgtcttgtatatctttaagcttcttccgatatttctccttctcttgaaaagcacgctctagatccttgttaaggccgaggattaaagtcctttgtttgtccactaatttccaaagttgcgcgttctgagaggccgcttggtgtttctctttcaagaggtgcacgatcacagcctcggcagatccagcggcattgatgagattgtttatgtcggctgaactcagagcattgacatcaaaggccgatctctgagagctggaggacagggacgagatagcagaatcgattgacgaggtgcgaggcatgatgcgattgggtgtgcgatcacccggcatcgagtgtacagagctgacggaggaagagccagatcgatctggttctggcgcacgggttgatttcggcgtattggtttcgccaggtcgaccgctagtattccccgaatccatttctggtgattgcgacgcgctttgaccagtactggagggtggcgcagtgtatggtgcattggctacgcgagtgattggcgaccaattctgggcggaagaagggttggatttcggagataggggactgtcggatgatgtagatccgccgacacggtgcgactgggggagggaacttgtatgcaacggggagggtgtgatatttcgggaaccaggagtaggaccggggcgttgatcagatcgagctaaataatctcgcggaatgagaccgttattgactgggaaaccggaccgattattagatgaagttggcgggctttcattattctcccgcgggatttgcgacatggctgtcagagtcgagactcatcagaggggtcacgttcggggggcgacacgaggcgaaggcccaaagggcgaaagcgcggaaccccggaagctgaagcttaagcgccagggagcaaaacagggggtattgttaaccgatcaactgattggaaagaaagcaacgatatgaacactccctttgtggcacagagaatgagagttgaaagggtgagagagcttaagtgcagtgtgggggggggagaaaagggggtatcaagccaataagaataataacaaaaaattagataaatactaaggagacgatcatgagagaatcgcagtccttctgaagaggaaaagagaagaagaagcgaggaagatgatctgagatgtctttggtatgcagaatccctttctgtcggggttacctaaggtagtaagaataactatcacgagtaactatataactactccgaggctgtttttctttccagtcactttgaatcattcttttcttttatatattacagtgtatcgtttataatggccttttacaaacaccatagaatgagaaaataatagttatatgaactgttgtagtacgaagccgtcctagcactcggagcaactgcggtggaaccgagtgacatgaaagtgaccgaaagctattggaagttggtgatggaaatattttgaatgtccagggcaatgcctggacatcgtctcacagtggactagtttgagttcggtttcagacttggcttgagatggtttctatctagaaaaatgacctagactcctgtaaatgcgaccgcaatgactatatagtacagaccaaatcaaaaagaaagagaaaaacgccggtcgaaggtggtacagaatgatacaattaggcgatgttgccagccatgcccatgaaaatagcctgggcggccagctgaagggaccagaacccgactttcttgaaccgccttttccgggcttgatcatccacgacatctcgcgcaaatgcgtcgtaggtctgcagaatttatcagtaatgatcgggggaggaaaagagaaagggtactcactgcagctgacaggtcatccatcaggccactgtcaaagacggtccagctgccatcaaaatctccaacgcgcttgactaagcggcaattgatgggaataaaagtgcgtttggagttgatataggcaacaataggacgaatcagtgcattgttgatgtaagacaggtcacgggtgaagatgggtacgacagctcgaacgttgttgaggtgcacgcgcatatccatggcgatgaaacgtcgatcttcagtctcggaatttgtactggaagacgaagatagaggttccggataacgattggtggtgactgtggtttctagccgatcatagaaatcaaccatcaccttggccaagctctcatcattttctgcaggtaacatgatatcggccacaatatctactgtcccttcgtgaatccaagagaagggaccctgaacaccgcgattgaggtggtcgacattgagtccatcaactcgaatccgattatgtttcttccacgggcttggcttgccgtcttcttcttcttcttcgctatcctgccggaggcccgtgaacccatgggtttgacgagcgtggattgtgaacaaggagttgtcataggacccagacatcatgttggcagagaggaaatcgtagaagagccattgcttccgcaattgagggaggtcgcacgagaagatgctcacggagaagggccggaagttgtccggttggtaaatggtgacaagcagatcatgcatcttgaaagagtcaatctcaaagtcaccaggaaggtgctcatgtcggtaggatttaggatccaagtcctcctccggccagtaaacgtggcggcggtcaacaacacctcgtatacctttcacctcaacatcatgaagtgggccctttccattgagccatttggtaaatgataatgtcacgttgaccgtctcaatcgacagatcaaattgtgtgtagttggtatcttcctcttcatcagatactacctgaaaatcttctaatccagtatcacctcgagctgcggctgcagccgccgcagacttcggagatcccttactgacatggcctgtgccttggcctggtcgcttcgacacaaagacattcttgaaggtgatgacgccatttttccacttgggcacgattgcagattcaaagacaactttgactccagaagacttggtaagatagttacccacccaccccgccaatgtttctattcaagcacattagtatccagaccttattgcggcataaagtggatggatgtaccttgagcaaagactgtgttgatcgcaaggatcaggagcgagaagaaagtggtagtccccacgacaacccagacgatgtgacccagcaaaacccacgagaataaggcagttatctcatccatattgtaaggacgaacacttcttatagaaaaccatttgaatcgtactttgaggcgtgaccagaacccagttgctgcagctaaaagctcctccttggttggccgatgtagctgaggcatatgtggtaagcgatccattaagtggcgattagtcgttgttggttgttgagtatctttgggtgggctgacttgtgaatgtgcggtggatgtatctttgccggattggccgggtttttgggaatggtcattttcgttgcgttcatgagtgtcttgcgaagctgctttcccgcgtcgacggtcattcgaggtgtgtaaagttcgcttccagacatgctgggcggcgattttcggagaggagatgatgcatgctgcggtattgtccgcagcagttgaggtaggtgagacgccgaggaccaagaagccaccggaagcgaatcttttgaaccgcgtgggttttgttgggagcgtcgagatgcgtcgtgagtggcttgaaagggacgaatcgaggaatgatcttgaggcgtaagcatcggaggccgatacgcgatttattcgtatgcgaccaagaaatggatttgctgtatcccagatatgggcatagagccggcgtcccagattggcagacatgtttgtctttacatactggacatgaatgagaaacttgacacgaaaatatgacaggcacactgtatcatgaacagcagttgacttgttgacaagaagcttgaaagcttgcaagagttgcgaggagcccgaatgaaatcatcggagtttgtcttgtttgcagcaaaaaattcccttccgcccacacttcatttttccgtgaggggggaactgattaaattttacgataacagattttatgagggaaaaaacttgattccttaagcaacacaatgtcggcacctacagctattcgccagccagagcaggccctagagtttcagccagagactgtctctcatggtgagtactcgatccgatctgcaaatattattttcaaggctgacaatcaatagatcaggatgatgaagttctgatcgatgtacaagccgtggacgagggcgctccgattaaccccgtcgccgagtctgcggaggacaccgaaatgcgcatcgatgaggaaggtcgccctgtcttcaccccggccaaggacgtcgccgccgcatatcggatcgagacacgaaaggtgcctgtcccaccgcaccgtatgaccccgctcaaagcgagctgggccaagatctgccctcctatcgtcgagcacctcaagttgcaagtgcgaatgaacatcaagacccgatcagtagaattgagaacctccaagtttaccaccgatgtgggagctctgcaaaaaggtgctgatttcgtcaaggccttcactcttggcttcgatctcgacgatgcgattgcccttctccgacttgatgatctgtacatccagactttcgagatcaaggatgtgaagactttgaacggagaacatctcggtcgtgccatcggacgtattgcaggcaaggacggaaagaccaagtttgcaatcgaaaatgccagccggacacgagtggtacttgcagaccagaagattcacattctcggtggattcaagaacattcacattgcccgagaggcaattgtcagcttgattctgggtagccctccggtaagacttgatcatataaatcttcaaaggaattcttctaacacaaaatagggcaaggtttatggcaaccttcggaccgtcgcctcgcgaatgaaggaacgcttctgattccacgactcatttatctcatctggcatggtgtgggcgttcaaggtgcatcaggtttaagctgtcttctttttctgatcttagaggcttgacgacgtttaacgtaaatatatcaatcaattcatggaaatttcattcatctcaattatgtttatgatcattgatcaaaaatgagccccacgcccaataagaaggccacgatctaccatgtcctacactctaatcctgcttcagggcgtggaacacctcctcgattccctcccgggtaacaatcacaatttgcaaaccatcgccaacctcgatatgtctctccacggcacttgtaaaggcatcctgtacaagcttcttggccgtgtccttatccagaggctcggcctttttggccacaagggcatgtccttctccgcttcctgggatgtattggttcttggagttgacttggttgtccaggaaaggcatgatcaagctggatgccgcaccggcagcccgacactgttcccgctcgtaagaacccaccgggtcgtagctgtacaaagctcccacgccttcctcatccagaccagccagaatagcatgtacgtagtacgggaagaaccgcttctcgtagaggatagtcgacaatcgctgtgcacatgctcccactgacatggttttcccatgttggtacttgtacatcttcaccacggtgtccagcttttccttgagagcgtttccatctgcggcgaaaccaacaacagaaagaatgatactagctccctcgccggtctcatcatcaccgccaatcttgaagactttgggtaccatgcgagagttgatattgtagcctgatgtagaacgagtgtcgccagcgaggatagcgtaatcagcacctgtgatgccgagggtggagccgccattatcggtgtaactagtgtaactgttagccagttttcctgcacagtgatcgagttgttccttacgggtagaacgagtgttgtttgacattagcggatgttggctcagagaaagagtatccgatagtcccagactggttacccatgagcgacgtcattttcggggatatggagcttgatcgggaggaaatatcagaacggcagctttataaaaaagactaaagggttggatgtagaggattctggagattgggcgttctggaggatggagagcaaagaagctgggtgtctgacgcgatgcggtagctgccttctattgattaggtaaggaatatccaagctccccgagagccctggagggctgtctctcgatacttacggcgcctcatttatttctgcatgttaagtttgacatactctcgttcgaaagataaacttgtccatatctctggatcttaccacagtgttatcctgatctccttcggtctcaacgcttatacctaggacgaattgcgacgtgatgcttggtcttggtgactatgagagcaacagtgaggatgaggtagaacagaatggtccttcacccaattctcaggtattttcagctccgaaacaacggcattggagagttgctgatttgaagcaacagcgtaacaaggatattccacctacaaccttacaagctagccaggacgaaggtaacatgcctcttaattctccgggactagctccgacgattggcgctgacgatttattcagatcataaaccgtccaaccaacaatcaaaagaggcacgcttttacatagccaccgattctgtcccagaaggaccggtccttggccccgcttctatcgacatggcgcccctctcggagaacaagcattcgacaagtggacgctcatctcccttttcggcttcacgtggactcgttcaagaccttactctccccccggttcccaatctagacattccaccatcacctcctgggtctcctaacccagccgcgaacgcgaaattcgagcatttcctcgcgctcaaaaaacaaggcgtacacttcaactcaaaattggccagctcgtcgtcgcttaagaatccaagcttgctgaagaaaatgatggaacatgccgggatcgatgagcaatcgcaatatgacacatcgttgccaaccgacttgtggaatccctccaatctaccgaaatggggtttcaaggaggaactcttgagaacccagcaaaatttccgtaaacaatcagaggagaaaaagacatcgggccagcgaagctcggttgattttgtcactggatctgcctgaagattcattcagcggcaaccggaccaagaataccaaccctacagtatgccagatctaccatggtctcgggtgcatcagatctttccggaaatttgagcactagagattatgacctcaaacggcggctccagcacataacttgattgcttcgaatattcggtagcgcagtatttgcctgccgggcatgggaacttccgttttggtatcctacgattcaagaaggagggctcttctataccttcaagattatgtgcccatcttggagaaacatactggtggtcgatccactgactccagaaagaggatcaacgataccctctcaattgacatagcgcacacttagactcgtgtacattatcatacttgtggatcatacattgcaacaatgatgcttgtttcaacatcctccgccgccgccaccaccaccactagatgccttctgtttgcgcttcgccttctcatacaaacttaaacaagaaaccaacaccattcgatcaaagtcttctccgtattccactctgatttgcagtttcccacctctgcccagtttcgcacctgaaaatacggccagaacatgctcggtgtgctcatccacgagcttatagttccgggcggtccatttagacggtgctgaatcctcaacgccaacggtgcgtgtacgcttccacaggaatgaccgtctcccgctctgagtttggtcagatccacactggactgtcatttcgaaccggtattttggtttgtggatgagttccttggtcatatcctcccactggacggcggtcacatcgtcggggtttccaatgcctattttgtaaccaccagacgacttccggaatttggagacggccacaattggggcctggctgctggtaccagcatggagagtaaggtcaggcttgttgagagtgaacacagatacttcgccgtagaacagaggctgatcatccgccgagttgatgtcgtagtgcctgtggaagagcctgttggtgatattatacacgcgtgaagggccattgtcaacggcaggggcaggggccgttgatccagcacgacttgaatcgggagaagacattagatttagaaataaaattatggatatcaattatttaaatattgtcaaatggagggaggtcacatcttttatacgagctttatacgttttaccagagaaggcgggattgacccttcggaagcgaatacgagcaccaaatcgggatggacagaagcacatgtatagacattggaagtgagtttattatagccaattatttgctttcatttttcttgaagatttgtattaaaggatataactactaaactagtataacagctgtagttatagtctacatcctcctggtgaacgcggagcttagtcagccgagctctccgtcagctcgactgcctaaggtaactagctccccatctacggagtatcgtcatcattctaccgtgctatccatctgttgtcttccctccttgtctgcaaaatacctccctttcgagcaccgttgaaactgtcatttatctccattcatcatgaaccactcacctgaagcttggggtcgcgtaggtggcacaactttcccattccttgctctgttgctaactatccgtccagcccaggaacgatgtctacggtgcctacgatcactcatatttgcagaccacaggtcccaaggcccatacctcatcccctgcagtgacgggaacgtcagtggtgggtgtcaagtttaatggcggagtcgttatagctaccgacaacctaggtatgccgttccattgtcacgttccgtttccttcgcattcccatctgacgtgatatgatttgtgaaaatatagcttcctacggatccctggctcgtttctccgatgtgaagcgtctgcgtactttcggcgataaggcaatggttggctttggcggtgacgtttccgacatgcaatacatcgaccgtctcctcgactccatggatatcaaggagaattactcgcctcacggcaacatgctcaacgccaagaacctgcacacgtaccttgcgaaggttttctacaaacgacgctctgagttcaacccgctttggaaccatgtgcttgtcgcaggcttcgatgcggagggagagcccttccttagttcggcagatttgctcgggacgacattctctgctcctcatctcgctacaggatttggtgctcatcttgcggtcccgatcctgcgccgcaagttccctgagggtacccccctcgaacaagtcagcaaggaagacgccgttgatgccttgaaggagtgcttgaaggttctgttctaccgcgatgcacgaagtaccgacaagtactcgatagccgtaatcacgaaggatgggattgatctgaaggaggatgagcagattcagggtcagagctgggcctttgccgagagaatcaggggatacggcgcccagactgcttagatcctaatttacgtttttcttttacatgtaatgcacacgggactacggatgcagagataattttgggtctaaataaccacaatgatcaattgcaatgactgagatgtgcaggtagttatatacaacttgaaccagtaccaactatatcattggtctactgcaagttcaagagagataaatttagagcttggccttaggcttgtcaaagaccacgcggttgacacaggatccgacgccctccagcgaaacctcgacattatcgccgtccttcagccacaaagcaggcttgcgacccatgcccacgccttggggtctgtaaagcagtcagtctatcaaattcaaatcatttgcttgctcatcagggtaactcacgttccagtgaagatgagatctccaggcaagagtgtagttccctgagacaggaaagctatcgtcttagcgacgccgaagatcatatccttagtggaggaagactggacagtctttccattcaacttggtcgagatagccaagttgttcggatcggcaatcagactggaagaaacgatgccaggaccaaacggagcccagccatcgaagcccttacccagtccccactggccaccaccccgcttgatctgccaatcgcggtgggagacatcgttaccgacagcatatcccaagacgtagtctagggccttgctctcggagacattattagcctctttgccgataacgacgaccagttcacactcgtaatccaggccctcgccctcctgggccagctggggcacggggatatcgtctacgggcccggaaaccgaagtaacgggcttgtagaacagcactggatacttggggataggcatgttcgcctccttggcgtgctgctcatagttgagacccaggcatcggactgtgccgatatccttacgggccaggggtgcgaggggcatgcgcacctctgccacctggtcggtgatccggtactggccaaagatgtcgccctggatgactctggccttggtggctttggcgatatcgctcactccggatgggaggatagcatcgccgtagtagatttggccatccttggccaggaagcggatgaggtgctattaggaaatcagcatttgatgcagtaattgatttaatgtatatttttattctaagatactcacagtaaaggtagacattggggagtatggaatatatggggaagttggaagttcgaggggagacggtgacgaagtgatagtaatccgccattcggccgggaaaggcctctcttgtcagcgggaaacatgtccagctccacccaatgatttccacgccttttccctcttcatataataatcgagattcgcaatggctcggttctccggtctccagagggacgtcctgtctctataccgcaaatgcctacgggagatccggaataagcctgaggtgggtttatcatcatctcgtccacgtcacttcagctgataacctattctattgtaggactccaggatcaatttcaggaactatgcccggtaaggctctgtcaattgcctatctgcctatctgcctatctccctgtcatttcctttcctttttctctccccaaacgggcattcccctagatatgtgcaatccggctgatacgggaatacagggctgagttccaaaaatatatcgcggtgaataagaaggactttaataccgtggaatatctcttgcgcaaaggtcatcgacagctcgagttatatgctaccccgggaatccgcaatatccgatgagcggatggggccaaccccagaatcttggttcctcggggtgcctacacgctagctttgtatgtttcgtctttcagcctcatatatttaccagtttactcattggaatagacttggagatctccagcatcgttggttccaggccgaattcctgcgaacatgttgaacattaacatgttgcgcgaaaggcaatatgtctgatatggtcgaggccttgctttggaagcattttgtataatagtatgtcatagtatatcatagaatgatcagtcattaaagctttgtcatgttctacctacataattagtttggttaactatgttgtatgtacgacatatattcgatgactactccgtaccggtactatcagcccttggaagtttcgagtaattaccaatcacacattattcatgctgtctaaaatattcatttatcagattattagagtagtagtattcagcatataatgtaacggaatacatagaatcaagtggttgtttctcgaagttggtggaagttgctggcggccggtcgaatgtgccatccgtttctggacgattccggaagtatagcaaccaccatcaactataacgaagcagaacatataaaatagcagatattccaggacaattagaacagaacacaatattcaagacaatctctcagatcatctatcatcattcttccaatcttcaatccaagaatcccaaactcatctacaatggccttcttcactactcaatccggccttgggcccctcttcgtcctcaatgagcacgagcttgccaaccaactcaagtctccccaatgttgcaagtccaaccagtgcaccaagtcaagccaatgcaccaagcccaaccagtgcaccaagtcaagccaatgcaccaagcccaaccaatgcaccaagatccaacagtgcaccaaaatccaaacacccacctccttcatgcccgcctttgacgtgcgcgagttgacgcacgcctaccgcctagacggcgaactgccaggcgtggaccagagcaacatcgagatcgaattcaccgatccccacacactcgtgatcaagggccacaccgaccgcgagtacatcagtgacgacaccaacaacggctcagcctcagccagctccagccgcagctcgtcagccgcaggctggcaccaagccaccgtcgaagacgaggacgcagcgtcgactgctagctccaccgacaccgctgcttccagcaatgcggtttcccacgctgccaaggacgaccagccgcacttctgggcgaaggagaggtcgatcggtgacttccagcgcactttcagcttcaccgcgcgcgtcgatcaggatgctgttcgcgctagtttgaagaacggggtcttgtcggttattgtgccgaaagaggctgcccctacgccgaagaagattcgcattctctgatttggaatcgaatcgagtggttttgctttggctttgaaagctatgcgcttgtataattgattgcattgggatctccgggtggcgtttcttttcccttccttgcatttttacttattttttacttctatgagtttactgatatgatctgattggaatcttgttacgataataaatctacatcgatgtttattatattgctatcccgtctgtagacatgtaatatgcacctgatggcacttgttaggctgtaagaacttacctcgctacttcgaccctgcgtctgttcttttaaatcaaagtcccttgcttgactagataaccttacttcgtatgcaggaatgaccaggaaaggcctgagccaccgaactagccacacggtgaaagactgaggtggtatccccacgcatgcattagactaaatggccaagaaaaccctaaaattacgaaacaacacatggcatacggcagacagaattcatggatttgtgtacgcaagaggagacactaattccatccaattccaaaagggtatacctaacaagactctatatccagatgtcccaaactcccgccaaagtaaaaaaaacacatcaactccaaaatgaacttttgacgccatgggcaaaagagacaaaatcaaaaataacgtccaagacaggaaacttaataaaatcattaccaaaattgtcgataaacagaagatggataaacagaagatggggaggtcatcatatgcacaaatctgtctggcgagcattcgtcaacctccggcggtagtcattgctccggcttcgaggccggcctcgcatcggctcggaaggagacaattcagcgtcaaggtctaggtcgtcctgcaagtagcctggggacgtgatggtgggcagcgggggagcttcaacgcttgatttcttgctccagatgcttcccagttggctgttggaccgagagagttgtgtagcgtactcttcattaatttgatattcagaggccgacctgcgaagtcgctccttcgtttcagtagtgtgctgttggtgactgagtggtgattctccggttatggtagaccccgtactagacgcaagatcaaacgattccatagacaatcgatctccatagaaaggccccttggtgaagccttgacactgtggaacataaaccagggaggtggatttgacttcgaggaacgagtcgcgcgaagaatattccgtgtatcggggcgcacacaacgttgaccgacgcgatcgcgatggagcgaggtgagtcgggtcgcttgaatcgtaccagcgagcagtggctggatgcagcgttgagtagttctccgactttgtcaccaaggtcagggaaggctgcaatttatcgctcgatcgattcggcctcgggatacagacgttctttgagctgtctgcaccacatgagctagatgtttgtgagtcagcagaactgtgagttcggctccgctgtacggagtggactgaagtggcagagctgtagccactgtcggacttgttgagggattgagaagtgctccgggaaagaccagcgtccagagcacccttttccaagtgaattcttgtatcgtcgaagaggagaattccttcatcttcggaatccccaggaaacagtgattttgtccgagggtggactgtgatagtaggagacttttcgaaagagaatggactgcctggaacatcgtccactttcttcaagtcgggcagggacgtaatctccagcgtggacttcctggttggccctatgacctctatgttctcaagcccaagtccagagcctggagcgccgggcccatccaaaggaattcggtcgctcggacatggggaggccgaaccatttacaactcgcaaagaccccaacttaagtgccccgagctgagtatatcgggcatccatcggactcgtcggacgcgccggagatggcaaacgcagcgatcgctgggtcgaaggcaatggccattgcaaaacggttacctccgtcggatcctcgatcggacattcaggctctccaatgggcgaagggacgcgtcggattgcgcctgttgttcgtcttgtggcaaccccgggtcgtgtcaggagcgatcgtcgacgcgttaatgagaatcgttggttgccaaccaagaagtgggtgttggaggatgtcgcatccccgatgtggttttcataaacagcgctgttgtgtctccgtaagggaattcgagtcgaactggcccgccttggtggctgctcagaaagaggcgagcgttgggaagatgcttcccaggcttccgattggtaggacgttcttctcgaagagctcgcgctcaacagggttggacgggtcggatgacgctgcgttggactctgctcatatataaacgttcgatcctcaatcggggtctcttcggacgactctgtttcaaaaagggtaggtgggatctcggctttcttgggatagctaccccttttctccacaggggcactggagatagtgttgccaacccaagggttttgccatcctattagccctgatctgaccgttggagagtctgattcccgttcagaactttggccgacatagaacttctttgtcaggggctttgaaaggcggttggaacggtgggtctcgtctttggctttgctcgaatgaatgttgcccatgacttcagaagcagatgcaattcagatatgctctggccagattcaactgggcatgcagcaggggcgagaatgatatacaattagaataagggcttggtgacagtatgatcactgttccccgcacgacgatagggtgacctagccagatggaatttccaagcttgtcccgatagagcttttcagattagatcgcaccccggactaccgacgccaagcaacgccgtgattgatcgcaggagacgtaatccgagccccaagctcgtgcaacggctgggttgggaattgagcgtacgattggcggctcagggttccccaacaatcccggagataatggggaggaccgcgtttcgaattgagtgcgatgcagaaaatggttggactggagagatggacggctaatgacggagagaattgaggtaacgtcgaaagcagatagcccttgggaaccggaaagtccccttcttatccaaagcaggatttgaggcgttcacaatctcagctgccggggaggtcagaccaggtgcccaggcgtagatcggaatcagcagatacacgatcggatcaacattaagattatagacagacaatttgcaaagaacagaaataaaaaaaataagaaaaattcacaaaaaaagagaatagtgggaatagaaattgggcaggatagtgtcactggggggaccacgatacataagaaggtggggagagaatcagacaaacgaagtgtatatgcaactaaacgctagaaacaaaagaagacgcaagcattcttttttttcgccactaaaagacttgtatacgcgcctttgcatcagatgaagctgcatgcagaggaatgcagaggacaaggaacatctccacgcgggacaggtacctcttctgccggaaccgggagagaaggatgtatctagtacgtgagcttagtatgtagaggcaatacattatgaaagtaccaggtacctcattgcacacgtagtatcccaacaactccattgttgctttcttctctttctatagccagtctgccgcaatcgtctctccttttcctctcatcttttccaatatcggatgtcttctcctctatctttgatttgatatacagtaacagtgggatcaagggcttttactcttgcgaaatccctaccctgaccacaccgcattcacagctgagcatctgcatccggcgctggtacggagtagctgacagcactctccccagcttcagccgcatggccgcatcttgctctacgttccccttcctggcgcagtcggagtttgaggtggcatgtcaagatcttgccgatcgatgcattgcagcccaaaatattggctggtccgccattcgactgctcacaaaggtatccctttttctgatgcatgaaccatctaaaccttatttggcccttgttttatatacgaaataagaatggaagaactgatgggaaatatggtttggatgaaactagccagagggaatcggcctcagaataacaaaatgtgtcaatgtgcccaacccgctagaagagccgctagaaccctcagccctggagaacctcgaagaatcacaggacgaggatccggtctgcagaattctagccccccaaaggacgtgtccacttgtcctgactcttcaccgcaggaagctctcgttcgcgccaaaccccatcccagcttacagatcgattatgacatcttgttgtcccccacatatcaagtccccgtcttgtacttcggcctcaggtggcacaaccacggcccactcggactagaagaagtctaccagtatgtcgtgccggaacgatacaggcaagaattgaagagtgtgggtgtaatgggtgggattagtatgggtgtaggtgcattctccgaacctcgtgacaagagctcatgtcttttttgttttttttttcttgtagtaccatcctggatctggcgccccgacatttttcgtccacccatgcaacaccgcggatgccatggcgaacattgcagacgcacagagcgtcactcccgggtcatatctcctcatttggcttggcctcgttggtcattgcgtgaacctgcacgttccacgcgagctttttgcttagcagtaccagccaataatcttgcatatgctggaaacgctggggaataaaaaaaatcaaaatgcaaatcgaagactccaagtctttcttggtccccagtagggtcttattcattagattactcctcatcggaggacgcgtccataggcacgtcgctgtcttcgtccatcggggcttcttcgttgtcgctttcctcttcacgcggtcgcttcacgccatggccctctccattggtatcggttgtgggtcgtggagggagtgcaccgggaggagcaccgaagatagacttctggaggtcggtcgtgacgggggctggcgcagtctcaactggcgcgacgtatgtgccccgaagtttggaaatgacattcgatgatcccttgccgtacacgattttctagacatccattgattgagcggggggttgcgatgaccgaagcgcaatgaaaacataccatctgtttgccgaaaaaatcgaatccttgtaaagcccggagtgcctgcgtactagcttggacatccctgaacacaatatgggcttggcctcgcattttgttggtcttcatgcaaacaacatcgagaacggtgccgtatgtggagaacaaggcatagagtgcggttcggagatcctgtttctgaattcttctgtcgggcaaatttgtgcagtagagtctaaaaattgttagcgccaatccgcgacaatctcctgtgcttggaagggcaagctcacgtctggttaggagcgccagtagcgacagccttgctgtcagcgcctccacgggcgggctgtgattttgaagccatttcttggatgattagaaatgggagagattctgccgtttgactgaaggagcaaatgagattgcgtatgggaaaacaaagctcaatcgcgtgtggtgtccattaccactcaaaacctcgacataaaagtagcttggggtcatgtgatgtacccacttactaagcaccgtcatcccccagctcccctcctgatcccgcaactacaacaatcaagtacacaagcacgacggtagagagatcctcctgtcgttattatcaatatgaccgctcctcaggttcaccatctcttccacgcaccaattgcagaccactcgttctcatccgataagaagacacttgctgtcgctcgggagaacaatgtggaactgtatcaacaatcaggcgacaagttcgcgctgagcgatgagctcaagggccacgagaagactgtcaccagcgttgatatcgctcccaacagtggccgaattgtcacttgctcacagggtatgttttggccaacctccttttactatactatatacaatacctaacggttgtatagaccgcaatgcctacgtttgggagcagacccctactggatggaagcctaccctggttcttctccgaatcaaccgtgccgcaacctttgtgcgctggtctccatcggagcagaagttcgccgtcggctccggcgctcgagtgattgcagtctgctactttgaggaggagaacgactggtggatctcgaagcacatcaagaagcctattcgcagcacgatcacaaccctggcatggcacccgaactccgtcctgctggcagccggatcgaccgattctcacgcccgagtcttctcgagcttcatcaagggcattgatacccgcccagagcccagtgcgtggggagagcgtcttcctttcaacaccatctgtggcgaatatctaaacgatactgctggttggattcagggtgttgccttctctcctagtggtaatgcgctggccttcactggacacgatagcagtgtgactatcgtgtacccgagcgctccagagcagcccccgcgggcgatgttgaacatcgctacccggttgctgccgcttaacagtcttatttggaacggcgagactgagatcattgcagctggacatgtaagtcattccttttcagtaatacgacttgcgctaaccgtacctaggactgtgagcccttccgtttccacggcgacgagaatggatggcaacttgctggctctctggagaataaggctagagaatccggaggtgcccgcgaggagtctgctttgaacatgttccggcagatggatctcaagggccaggcccaggcggacaccaagctcaagtccacacaccagaacactgtgcacaccatccgggtccacgaagaagccggcggggttgtgagcaccttcagcagtaagatcaccgtcctgaaaacttgagatgtacgagactaacatattattatagcgagcggtgtcgacggccgtgttgtcatttggaccgtctgatttgaactacgtttgaatgctgacctcagtccatggtaagtatggttatatagtattggatagaatttttcgagtacattctagtctctcgtgacatacacgtagttgtagatctatgtctgtagactgtatgttgtgctccccggtcgtaccttccaagattgatcgacataaaccgaccaatgaggaaatcgatgacataatagagttaccccggattctggtcacctctccacatcacgcggtcatgctctcttcctttaaagatggatttataccctccctcctaccaaattcagtatgttaagccatggctagcattttactccttcctttgctactatatatctgtttcctgagcttcgtctcagcccaaaacaagacgaaccatgtctcaaacgacctattcaactccctggaggagttatcccggctagtggatatttcatactgcgttggaacaacgggagtacagcagccatttcagtgcctcagccgctgcgatgagtttcctgatctagaactggtaaccgtgagtcatatccctagtcaactctaaaagacacacccactaacctaatccaacgatcccgtagacctggaacaccggcctcctcctctccgattcatgcggctacatggccctttcccacaccccctccgccaaacaaataatcctcgccttccgcggcacctactcaataacaaacaccataatcgacctatccgcctacccccaagcttacgtcccctaccctgaccccgaagaaaataccactaccatcccaattcccacaggacagcactgcgaaaactgcaccgtccacgccggcttcatgctctcatggctccagacccgaacaacaatcctcccccagctctccctcctacacaaaaaacacccagattacgccataacgctcgtcggccattccctcggcggcgctgtcgcagcgctagcaggcctcgagatgcgtctaaagggctgggatgcaacggtgacgacgtttggggagccgatggtcgggaacgaggcgttcgcggcattcctagacgagcaattcggactcggggatgggatagcgatacccccgcttgaaggggggatgcgttttcgtcgtgtgacacatgttggggatccggttcctatgctgccgcttgcggagtggggatatcggcctcatgctggggaggtttttattacgagggaggagctgccgccgcgtcgggaggatgtggtttattgtgttggtcgggaggatcctgggtgtattgccggtgatggaaatgagagggttttggtcaagttgtatcgggatttgaatgttcctgttgggttggttggttctagtagcgaggggtgtcggtcgagcggtggtggtatgtctgaggaacaggcagtcttggaacgtgcgtgttcagatcttcctggtcgcgaggatagattatcgcctctccgatgggattggtctcttataccggcgaggtatcggatttgggagcttttttacgctcatcgggattatttttggcgcattggtctttgtgttccagggggagatccaactggataaagtagtatatctatttattctgttggatgctggcgttggttgcttttttactattgatataccccatactgtacattatcaggtaccttgctttacgagaaactcctttctttctctgatatatatcacctatttctaagattacttcagaacaatcgcaagtggagcctttatcaaatcagaacagcggtataattatctcaatatcaacagggcatgaacataaaactagggcgcataactcatgctaggacagagaagaaaagcagcagatatacaaacacgccaaaaaggacaaatgaaacccatcagacaaaagaagagcaacaagaatgctgtgcaagaaaaaaaaatagtccctcaatacatatataaaaatactcaaccttcaaacctcatcaccgcccatgatccaaagacggcacaataaccggcccaaatttaaccacgttcccaagcgccccttcaccctgaaccataaagtccgccgccagactcaatttaccgaccgcggcaggcgggacatggccatatgaaggattaaccgcctcagggtcataagcgacaatagcgacgtagttccgacgtgccatgagcttgcggtactcacgaggctggccgttgacgtccgtctggaagatctccatcatgtcttccttggtgtcgctcacctggccggaggatctgtggccgttggcggggatgtagaggggcttgctgtggctgtgcaggagcttgatgatgtacgagggcggcggggtgttgacgacgggcgaggcgatgagttggtacattgtcttgtggtcggatgggtttgaggggtcgtggacgagacctgcgccgcagacgttgacggcgccggagaggaaggtcatacggattgatttttggtgcgcgatgccttggagtgtacggatgagatatgtgcgttcgaggtcctgggttgggttagtatgtatgtatggcttgagggtggatgttttgtgattcattggaaaagggacaaaccttcgactcgtgtgtccattggtcgcgtagctcgtccatcgagttgaattcgccaaatggactcaatataccacccatcagtccggatttacctacggctctctttaccgagtcaaagcctgagccgacgaactccttggcgccgaccaccccggctactgagctggttaccttgcctagtacgttgtatgcgccggtcacggctcgctttcctgttgcgacggtctggacgatgtgttctgctgtctctaggcgggggtagatgaggggcacggcgatcatccagatacagtgctgtacgctgggtggtagcattgcaaccttcgggaacagaccctggtacgtgggaccggccatgacttggtgtgggtttcgttctgatcggcaatctggtccgacgacgacgacgccgggaccgaggtatttaacaaagtgccagcctgtgccggttatagtgaagaggtccatgtcgttgctgacgttacggaggatgtcgagagttgtgtgatgctggaagaggagatacatctcgataccgatgcggccgatgttcttgaacatgttcgagaactgcatgtgctcgggatacgagccgaatccatcgaagctgtgggtatgtcagtgctgctcgtagactgttattgtatggggactcacatgtcatgatcatcgatctggcagacataaggaatctgcgcaaatgactcccttatgtggggttgatcgaagtggctggtgtagtaatggaagtacgcgtaagaaacatcctgctcgttagccgctgtccaaggcgcgttctttctagcctctttcccgctgatggtcaaccactgcttgagagacggaatctctttccacatgcgatccgcatagatctgaccacccagacataactgggcgtggaagcctccgatctcattgtgcttttgcatgatatccctccacatgtaaccgacgccacccagacgagcccgctcaccagcattaacattgagcgagaagtcatttccagaggtagcaatgaaccgccagttggtttcgtatcgaccagcgacaagaaactcgtagcgagtgcaaccaaggtgtgaggtgatggcgtatgtccatttagcaggacccgcatcgtccatctgcaagtcaatctcatacttgtagaatgtccagcgttgatgggcggcaatgttgattgccttcaactgtctcggatttggagacaggtctagactctgatgcatgtggattgtgggtggctgcgcggcatctgtcacaagcaggatagatcccaaccagactccacgttcgagatccatgttggtgtaacgcagataaggaccgaagtagacaccgttggttggagcgtttttgtaaagatccatgccactactcggaggaggcccagagaatccagacattatgggagactgcaggctttcgaagccaggggtcagaggcacacccggcgatgctagaggcttcccgaaagctgacagacccggagaaactagcgggtgggcggtatacacacttcccactggggacaagggcgtatcgttgagattaagcggcgtagggcccttcgggaactcccactgagttgactgtgtgggcaagtggatgtagtaatactgccccgagctgggatccatgtgggcaatccacccttccggaagaggtggtggagatgctggacctgcgccagagggccctggagaagtcacctggactgtctgatgatggaaaccggacaagtcattagcaacagacgcctgaggggattgttcctgtcctgtttgctgttgctgtctctggtcattcgcaaaagcgggatggtcctgcggcgacactgccggtgcaggggaagaggcttttgtagcagggttgggctggtttactaaggccgggtgcattattgcggctcctgctgctgctgttgctgctgttgctgccgccgctgcagcactgcttcgcttttcagcgggatacctattcgaagcagaaggaccggatacactcgagtaggcgggagggggagaggagctaaggcgcatccggtccatgtcttgttccaaagcgttcgggggaacccttcccggctgttcttgctgctgttgctgtagcccagatgcagggtgtatttgggatggtgatccgccgtatgaccctggtatctgaggcggtgggctgctatattgtcctggatgagcctggggttgcgggctgctatattgacccggatgaacctggggttgtggggtaccgtattggccaggatgcgcctgaggcggcggactactatattgacccggatggctagcagacggctgatgatcatcattgacgacctcaccaccctgataaaccgtaggcggcccatgagggttcgaacccggctgctcagtcggagtccacgggcgctgctgctgctgctgctgtgggacaatcggctgctgtcccgagtactgctctgctcgtctctgtgcagcgacgctatgcgacgactggataccctgcagagtcccggtgcccgcaattccagccgcggcatagcgggcctcgatatccgaggttggctgctggcccggtccgacgataggagtctccggcggcgggggcgagccacgctgggcgcgggttgtcgaggtagaactgatgcgattgagcgggccttgtgcggcctggagactggacgggggacgggctatagacgtagagctttggcgctgagggggcgggtagtattgttgacggtaatcatactggcttgtgtttgctggtggctctggtgggccgggtggttgttgttgactggccgggggtcgggggtacggtctcgcggctagggcttcgcggtctggcgcatcgtagctgggagattcgggcagcggctttggggctgcgcctcttctttcggcgagtgttgcgactcggggctcgcgaccgtcccgcggtcgcagcgatgttgggtattcgtttggactcacggagcccgagccggtgccaggaccagctggcggagacccgtatctgatgttgtcgtgatagcgctcgtttgaacttgaggggcgcatctgcggacgttgacgctcgtccgggtagggtagcggggcgtttggtgggggactggagcccgcggccgatgctggggatgatgagtcccgtttgttgatacgtagagggccgacagtgggtgactcttgtctggctgggcggtcgaggaaaagctcctccggatggagggcacggctgccactcatggtgccgtggtaaattgcggctgggcttgaagctgtagaagacagaattcagccaccgcaggatgcgaggtactcccaattacggagataagcgcgaagatcgttgggaacgggtggtagatgcggggtgggaaaactatttcatctattcataggaattgtccgagagtaagaggagaacagaaaaagaaaaggagaggatcagggagattatctgtagccgccaagttggcgagacgccgaccccgcaggtgatgagaattatcacaagttgctgccttgtggcctgctacagggatgtagtacgcagaaatcgaggcagagatctattgacatccagttcccatacattctaatctatggctcggcccgagcagttccatggaagaacggaatatcagattccacatgttcgtttatatacatacagtccatatccatcatcaatcatgctaacatacaaccctgatagtccccccaaaaagcgaatatgccctagtaagcgccaatgctctgtaaaaaagcaaaaaaataaaaacaaaagaaaactccactgtccaatcaaaacccgaaattaaccatctgaagtccctcctgagccatgaggtcagaccaatccacatccaatgtatgacccacatgcatgagtcgctccaactgccgctcatagacaatctggaggatggcacgagtcgttgctgcattgcggcccatgccgtcttcctcgtcttccatgctagtcatcaattccatcgccatcatcttcaatccactagccgatgccgtagcacccgctaggaacaaggggaagactaggaagtgtcgatcagcacgtcgagtgtgagtagtccgttcggccatgcgcaggatctctgttacgtggtggtcgatttctgcgtctgcggagaactcggactcgacgcgttgtccgggccacatgctgctgtaggagaagagttgacaaacatggtacaatgtagcagactagaaggagttagttttttcttcctttgaataaacgcaaaaagtagaaagaactgacctgctggatgatttcccgagatcgccgcgggaggttgtcctggtgttggtgtaggaaggcaacatcgggggattcccacagtctcccgaaagcctgacgcagatctcttaattcctgcgatctcttatcgaactccgcaaagggcaggctctgcttatcatgacgaagccgagcagccaagaacccaagttgagcagctagccggaatgtgtcgtggtacagacgcatgatcaccggtaagctctcatgctcgtcggagtagatcacactgtagccctctggggcggaagggtagagaagacattcagacccagggagcatctggtggtcgatgacggctcgtacaaactctcccgtccctgctccgctgaacagggcgtacaagtcaatgtggcatacccaccagaggataaatggatggggctcttggccatacttggcccgtcgaaggaaggcgatgtgaaggagacgagagatatggtgagaccatagattcgagccgtgtggctcggcggctgcgatctggggattgtaagtatgtagactgagaaattgcaattgcaaccgcttacctcgtagatcaggagcaggaagtgcgtaaggaacagtccgtcggaaaccaggtcatcgttgttccgtatactgacctggagcgaggggaaagcttgctgataatattgtagcgcatcgacattgtgacccgtgccgctgtgcgagagactaagggctgatacagccatcatagcgtgggaaagctattcttcctgttagcaggcatcattgagaacaagaatgcaatacccacaggagggaaacgagtggcttcctgctctaggaagtccatgctgagagtcataaagtgactatccgatccgcaagaatcatcaagcctatggtcgcgagggaacaactgccgccatacgacatgacggaaatgggaaaagatagtagaatcctggctttgctggtccaggcgcaggtccaagaaagtcatctcctccaccttcacatccggcgaaggaagagaagtgaaatttggagagagcgacagattgcagaaaggatccgagatctctgaggttggagagatcttcaaggtcttcccgttaaacggcgagcggcgagtgccatcttcaaaagtcttcaaaatgaccacattgggatcttcgtctctcacgtcgcccttggccgtgctcgtggggctactagccgcagagctcctacactcgctggtgggatttgatctagctcgctcgattgcatcgtctgcatactctggcagcgcggaaaaactgtctggtgtcatcacgacatggtacgtgccgggactaaaggcttctgctttcttttcccgctcttcgtcggaagtgagcaggtaaaagggcggaagggaatccctggaagagaaataatcggttctctcatcattggaacacggcgaagtgactactctagttagtatggactagaaaaaaaaaaacataaaaaaaggtacttacgatcccaaacgacatggccgtccgtcttgacatcggccatgcggcccatgatacgaggggtatcatcgcgaaaagccaggcgcgggcgataatcgcaagtatggcccagccgagtacattgctgtcaagagcatgagtaaatgtggattttagccaagcgtgaaagaatgcatacattacattgcgggtgtccttcatcacatttgactgaagaatgtgagtcagcaacgaaatcggagacacctgtgcaagttgtccaagtcacttaccctttcgactctgaaaacgaagaaaaacagacgaattagttaactgcttcctttttgaattaaaaaaacaaaacaaaaagagactcactcgacatgtcctaaaataaataagcttggattcccggttgagtcaaatatagagacgatcaagacgatcaagacgatcacttaccaacaaccggtacgagatcgtggaggcaagcggatgcgcggtggagcgatcaagaccttttcggacttggcaaaggcatcgaagagatcttccttgggggcaatgatgggtaatcgcaaaggaggtttcccagagactttgctccgtctgtgttgcatgaccagactggccgtcatgaggctgctaggatcagttgtaagtacgggctgaattgggagacttaggggacgtacggtatatcaattcaattgtcaaagatgaaagagagaaagctagagaatgagaagaatagggcgaatcaaagataaaggaaacaagaggttataataagatcgaaagggaagagaaaggctagatgtatggaaaatgccgtttatgggcgcaggtatttggacgggtggcgggaataaagggaaatccaatggggaaaaacagagaaaaatatataaataatgctgaaataattggattagcgcattattccattattctacaggtgaattatgtgggaatcagggaagaccagagagctaaggggaacagaaaacgcaggggaaaacgatcgaaccaaaagccaaaaaacaaggaaaaaacgcgaaaaagaaaggaaaaaaagtcaaaaccgaatggcatgcagatgccaaccatgtggacaggcgaaagtcgaacgttgctattaatatgagattacccaaagctattacggactaaggggaactaggggaactagaggaactagggcagagataggatggccagggaagagacaacctcgggaagtgcccaaggggctggctgaagccacgtcgaacgagaaacctccctttttttttatcggagccgaggaatgggctcaattaggtagctacttacgagctctggggggaaaaggaaggaaaacaacgagcaagtctcgatcggccgcgacccccggtctggatcgcattgagggagcgtgggaaatcgaagagatcacactttggcccattctcggaccagttgggcctctttgggacaagtcgcgatgacttttagacattttgggactctccgcattctaaacggacttggccgggaattaagcgagtggcgcagacttgagaccactcgcgacaatccaactcaatccaacttacccagtgctgcacctaggcggacttctattggcgcgattcctatgttggccctcgtatcgaatccttgtacgaaaaaaataagaaataagcatctttcatgatcgactggtaaataaccttggaagacaatgaaaaaaccacgtgggaatcttaattcgggaacgccaggacctcgtccaggagccgttgcactggtccggatcgctcgctggctctccactgacgaacacaaacgagaagcgtgtcaggcacacccgcttgggcatgcggactcagtttccggtacgccagaatcgcttctgcacgacccttacggatggcctcgacagacccgtctacttcccccgtgagaatcttgtccgcgagagcagtcaagggtgctgccatctggttaccggatgcctccggtgagacgatccacagatccactcgcgcaaagaacgcccggagctcatcgtagaccgtgctgacgacctgtcgtccaccctgttggaccacttgggccagtggaccagtcatctgttccacgtactttcccagcgctgtggttagtgttagcaaggtatgacgctagggggttcccacaattcggggtggaatttaggggctttaggggctttaggggctttaggggaccgaccttcacccgaaccggcggtggggttgaaacattgcaggagacattgtacacatgccgcaagggtgtcgtcctgggtcgagccgcgcccattccgcgagtctatctccatctggtcttgatcttgctcttgcatctcttccaccacccccggaataatctttaatgcgtccggcatgaagtcgaggtccttgcgggcctgtgcgatctcgcccattgcccgcagtccatgcggccggtacaggacgttagctcgcttcgcttcgcgaaccgtaatagtctgacatgcgttagcctcgattttgcatctcgtaaattataatcatgggggaaaagtggcgacatatcagcccataccttcatcaggtgactcagctccccattggcttgccacaacttctgagcttgcccactaaatttcactagtgccttgagcaccacttctttaccttcccacgtcttccccgccagagcccgctccaatacgggccaaaccaattgagccgtcgggaggtcaatctccacatcaagcgataaaaccgcttgcgcaatcgcccgggcggccgtgtgcttgatagcccagcggggggattccaaattgtccgaaacgagacccacaatctcgcgaatgtaaagcgacacggcacgcgatccaccaacgttatcttgccatgtcttctcaaactgctctttcacatgttcatcgccatcgtgcttacacatgaagacgaacggcaaggcgctcgccgcaaatgccatgaaccgatcgttggacagtttggacgccgagtacaggatctcgccggagatcactcgcggcgtggcatcctcggctgttagatagaggttcttggcatagtcaaacgtcttgagaacccgatcgtccgaagcgagtcgcagcagatagcccatggatgagcagtaggaggcgctgacggtgtcgtttcggtccaccacgtacttagtgaggataaggatgaatcgatctgcgtatgggcggaagagcaagcttttcatgctaagcagcactagaacgcggctacagcccaccttcgttggcaggcccacggccgaccgaagcacatcttcgagtctctgtgacagttcgtcaagattgctttcatccacgttgtcaatcagataccgctcaatcacctccatcatcggggatgtgcggatgctagacaggcgcattttgtcaatttcttgaccggtcagaccgtatttgtccgcattgaggtggacatagttgacagcctgtggttccagagagctcagagcactcaggaacttctccagcatattgggaacatatgggcgtagtaagctgccggggctcttcttaattattgacacaagagcaccaatggcatatccttgcacttcctccacgctggaatccagtcccttgtcgctcagaaggaagggaatagcactttggagtaaagtacctgcgcgcttctccgtgccgctggtctcgagtgtgcggataaccgaattggtaatggtttgacagagcttcagcgcagcagtgcggacagattccttgatatcatccagcagtttgaaagccttgctgtaaatctcatcaagatactgggcgtacttctccggacggcgaccttgaattaagtctgccacggcagcgcaacttgcttgccgaacacgccattctcgaccagctagaatgctcttgagaagatcctgcatgatatcatcaaagtgggtatcgatgacaacagtagggtccttgactagtgcttgccagatagtgttcatagacctttgcacgtttgggttgggatcgaaccggtaacggaaaagcttggggtaaatcttagggttcttcgccagatagccatcgacgctggaatcagaaaagatgctgctgattccgaagcgaccaaatgccgcacgatttgtccaaatagcattgtttgaagccagtgacatgaaccggtagaccagagtggggtctcccgcctcagcggccaggctcataatatccttgtaagtgttgacagacgacccttcaccagtggggagggctccaggctcaaatagctgggtgtctgcctcaatcttgccaccaccgagattgggaccagtcgaagtgaatgactcgaccaggtcttggaccaaatcgtctttcagggattggtcgccgatctcataaacaaggctgagcccgtgcgctccagtctcctgcactacctcgtcccggtttccaaggaggctgctgaaagtagcttggcacttacgcagccgctcctgcatctcctgcatgtgaccgcagttcttaactagcgacaacagccagattgcagatgccttgcgcagagatggcttgggcgcaatgcaatcggcaatgaccttgtcacagatgactgcaaataccgagcgcgggacgtctgagcgagggaattctgcatctacgtcgaaatcctggataagagcccgagaatcccaaccaacagcgacattgctcaaggcgtcacccacggtgaattgtacttcgggactgcggatttcatgtagactgtagagtgaactcaggaactcgccgaacaaggtattatccgggccaggccgggaaaaggtcagagtcaacaaccccagagagctgatggggatttgattctcggttttggcgtcacgcgatagcttttccaaaattttcttccagccatcttctgtggtaatatcaagatgcaacacgcccgaaagacttagctgtccaatggcctcttgtgcagtcctttggagcagagtatcacgggaaacatctaaaatatcgaagagagtctcagtaaactgcttgatttgtgcttctggggctcggctccctagaccgcggtacgcaagtcgactcaacaaatacgagagcgccagaattgcaccacgggctcgcatgacctcttgaccaacagcagtattccacgattggatggtagcagttagttgggtaatgaaactctttagttgctcctccgagaaggcaggatgcgaaaccagaattccaaatgcccgtgcagtaataccctggttatcctggttgttgctgcaaataggctccatcaaggatgacgcacgcgagatcaagtgttgaacaacgtcattgggtgctagcgagcagatttccacgaaatgaataccacattgccgcaggccttcgcgctcgcccgttacaagaccttcgagggtgccagacaaaaatgccaaaacggactcctttgcagactctcgaatgtagtttctcacggctgaacgggcctccacgctagtggagagaagcacttccagcttatagtcccaatcttgttctagatctgcagcaactcccgaggctgagaacgcctcccagagcaatgtatttcggaggaatgagatggcaggcataaatgaacctttgtaggggccagaaaggagttgcgacgcggacaaagcctgaacattcaagtgttcctcttggccccctgagccaagcaggaagcgagtagcctcatcgaactttgggaagtcgaaccaggattcgtcttgaactggagctgccgatgaagctgaccatttcccatccttggcaggattaaggagtcggtaccagtaaggatgaagacctttccttccttcttcaacgatttcttgttgcctttctggacctcttgcaatggccatcaaatcaatccaacgggcgaccacatcaccaaacggcaagaatcggttcgcaaagcgcactgcggcatactgaacacctcgcacagcacggaaaccggtgtcaggttcaatatcgccaggctgcatgctcatcagacgaaccaagaatggccgcaattggtcctggaaggtcttgtcgtggctgtccaatgaagagttgagaatactccctagtgcctgatcgatgctgacgaatatctgagaactcgagtcatccgcactcaaggaagcaaagagccatcggaccaggtcgaattcgaagctctctacagcaccggcttgcaacgtaaagtcgaccttaggaaccatgataccaatactctcgtaggcaagacctcgcaagttgaggtctgttgtgggtagtttctgcccgctagctgccggactgggccatccttgggactgaatgaaatccctcagccctgcaataattatgggcgcgattttcttgagatcagacggtgcgcccatacggaccacccaagtagtaaacgtaaaaatctgggtcctcagtttcgacgcttgtaacccctgagaggatctagcagagtctgataggagcccatcttcaatgagcctcaatattcgctgggggtcagccgtagctttgatggacttccccagaaagacgagaagcttgacttggagcggaggccgcgcgggaggagcaccaccagcgccgaaatacaaatcatacaactcctgcacaacatcaggattctcaatatccacagcaaatcgcttcagagtctcatctccaagatcagcaaggcgggagttggcatcggcagaagcgattagtgaaggcaggaatcgttgtggatcttcaaaggcaccgcttccgatgaagcgaagagcggtgacttttgtctcggttaaattcaaaccaccatcggtagaagggttccatgtctcgtttgcgggagcacccttgttcaagaagttatactcgtctggggatagaccgggacatgttgaagtttccttggggccaggggtaagaagtaacaatttcgccagccaaaaggacaagaattgggaatcttcatctgagagaccgagtcgggctttcaggcgctgatcttcttcgctgcccttcgatggcagcttaagaagtggcaatagacgcaaaaccagattaaatacgatagcaccctgagtgggtgacgtcccgatcttcgagataccctggagcaagggcaataggatttcgactctggcttcggagccgaggcgatcaataccttgctgagcatagatgagatcaaaatgtctgatcaattgtgatttttgctccttgaactgcttcaacaatgctgccacaggcagctgaatagagggggctttgactcgggtgttgacatgctgacagaccgagatgattttgttgcgcacctccacgctatctgacccaagcttcagcaacaagggaggcagatatgttccaagcagtgactgcagcttctcatctgtatctgccatggcaattctaaattccaccttgcctatcagactcaactcgcgagcctcaggactctgtgagtccgccatgataaaagtgttgtagaagggtgattccaacaaggcatcaaattgacacgatagaaaaaacaccaagacgatcagatttataaatcaatcaatgatataggcaaccgcactcacgtcatgtccattcaagtgaacagtatggggggcgctccattgattagtcatgatttgattagtcattttccttggcagccgctcgggcatctatatctggcaggtgcgatactaaacgaagtcaacatgaatgagtcaacaataaattcatgtagctacatacgtatataagagaagaaaaagagggactagataagcaggtgaatattaagtctatatggcaacaaaacctagtatgttctaaatcaaagtgggagtctgtctctcaaatcctccattctttgatcagcagcttcgcctctcaagaaccgaccaatctccctttctgcctcagccgaagtactacagtcatccttccgcttgacattgccaaacagacattgccaaaggtcatccttcttcaccatctcacccacgtcgccgcgttgcatcaggtttgcgagagtggcatcttctagttccatcgagtttgcagattcaatagccgcttcagtaacattatcgccatcagcaggagatgtcaagagtgctgttttgacttgcttctctttctccatgatgtgggccaggcgtcgggttactgagatctcatagatggattcttccaccgtgccggagataaggtacatccatactgttgttggtctattttggccaatgcgatgcactcgagcaattgcctggagctcgatggcagtgttgatgagtggctcgcataaaaagacatgggttgcaacggtcaaattcagtccggatgattgtgctttgccatgcaaacaaaagcactcaatctagattataaatagtcagcgtactgcgtccaatgagggatggccgaggttgcttacagccgggtctgatttgaatttctcaatgccacccggagagtcaatactggtgctgactattccagagctttggaatacgctttgtaacctcgacaagaaattcccgtattgagagaaaatgaccgattttgcgccagggtcgtgttcccgcagccataggatgtgttgagctaaagtgtccatctttgtcccgtaagattcctccaactcaattttcttgatctcattgagatggccggagctgatgtcactgtagatcgcattctcggaatgaccctcatggtctaattcgacaaatgtcttttcctcttgtacaactagctcctgtggcttgtaggtgatctgatggagatcattacgcaccaatttcctcttgcacatcgggcaatttttgtgttgagcccaccatagtcgcaagcagatagtacagtatttgtgaccgcacacagtcaacacacctgcaccaaaaggtcagtctgcgtgtgaatttaaatccagacaatactcaccaacttcgaaggtcgattggcagataatgcattctcgaacattactgtcagagctagcatcatctcttaggtgaaggagatatcttgctttagacttgagagaagcaatctttgcttcgataataccctcttgctccaacatcagggtaaaagaagattcatctagcggcttgcctgcactttcctcatcgtatggggccaccgtatctgaaatctgctgcatgtgacgataatactccagtcgattgttcatggtatcgcggaaagttgcaatttctctactcattttgaccgatactttcagttgctcagcgatcatttgaccggcgtttttcagaaccatttcgacgatcttatgttcagcacgagcacgcgaattgcccgaagtggcttgccactccagcgatgttataagtttgcgaagctcactgacaataccgcggagcgatccaagatcaggatcaggcataagctgactgcgagtttccatgatcttcagaaatagttgcggagagggcccctcacctcgttgggcctggacgattccggctttggtttcgtgggaaatgagagtattcttttgaccagtgagagcgtcatgacggtcgctgtacattgacctcaaagcctccatgtagacgtacatctcatcttgatgtcttgttgaccgctcatactcatcaccctctagctttgcatcttcttcctggtcaataagcgcctgagagaccagtccgaccatgacatctcgccatttcttgtattgctcagcatgcttgttaagagcgtcacaaagatcttcaaatttggtgagcagattgtatgactcgattcctttgctgtagagatggggaaccattttcgggatgatcacaaatttcttgtctcgtgccttaatcttgatttctttcatgtagcgctcgactttccgggagatatcagtcaacatctctttccgaatggcttttgcagcctcataggactcatcttcaagtttctcaagcgctctaaactcatccgaatctggctgtgttaaatttgtatcgctcttgatttggtaatatgcgttcgcagtgaagaacactgcaatatgctggacctcgagtgcagctcgaagcttcagtcgacactgaccgaggcggctgttcttgtctgcctcttcgtcctcttcgtcctcatcctcatcctgaatatcctggtctttgtcgtcggcagcgcctttggtcttcactaggcgcagttgctctctgctgtcttcaactagccgagtggcatagttcaatacttcctgccaaatgacgagggcttcttggcggcgttttgcattttctagaagctggcctcgtcgaagctgagataacaggagcgatcgttcttccgtacgtatagctgcctcgttggcctcagtcatggcttccagaacgtgagccacagttcgcaaagagccggagcctaacattcgatgttgaggcagaaaaacgtcaggatagaggcacgattggcggagtcttgttagccaggtacgcattttttcgacaactacagggtcttcggggtcccaattgcctccaaggggggctcccgaggcgtccaaaccgcattcttcacacattttctcaaaaagctgaccgtacctctgttcttctacagctggaaatggagtagtgatcacaatgcgcttttgaggtggtaggcgaatctcatccaatagctgacctttgctatgccgaagagcgattgtgttgatgatttttgccaagactggcccgaaaaacagacacaaccgtttccacaaaggggcggagaagcagaaaggctcataatgaagaaagattaagagaccaaacaggtcgtctatgtctctgcgcagtggggtaccagtcacaacccaagcattctctcgagggatcaagcgagctactttcgctgcattgctgactccactctcaatcatctgagcctcatccagacatacacgccaccatgagaggcgaatgaggggtgtcctcctctgttcaaatcgcttttcgtgccgtagagctcgctgtggagcttcattcgcatagtaaatttctttcgcgatgacattgtaggtggtcagaacaacatcggacttggcaagctctttgaccatcatatcgtcagttgcttctctccaatgcttgatgccagtgtaatgatgaacacgaagagtgggagcatgatctttcaactcttgtttccattgttcaagaatcgcgggtggtgtgatgatcaaagtggcaccaatatgtttcaacccgccgggatcagcttcgacatgttcttctcgcttattcagacttatcaacgcaatcacttcgactgttttgcccagccccatttcctctgccagtattccgcctttcagattatctgcggcatcgcgccactcggaaagatccgttgtcagaaccatgaaaagatgactgaagtagtagacctgtccatcggcatctcttgtggaattgaaagacactggcaggtcactttttggacgttctctaacgggaattatttcaccgtttggcccgacttctcttccttctctttgtaaaagccagcgaacagctcttctctggaatgggaatagcttgcatttcaaatcagggcatatgatattagtcgaactttccgtagccttgggaacgtgaacattcttgtagaattctcggggagaccatttttggacggttccgagcatttcatcgcgtgatttgcgcaggtctgtcaacacagacgggcgaacacatttttcctgcagcacatatcttgtaaaggcttccaggtctgctttccccaagcggttcaaacccggtgctttaatagaatccctccaaagaacaaccgtttcgagagtaaagcttgctccatctggtaaggcacgtaggtgcgcctggtagcaggaagtaggtacatctttgaagaactgatccacgtgagcaagtttgctggcggcctgaagttccctgaggagatcaaatagcctcaaatccttgcacggatataatagcaatttttcttcatcgagactagatagttccagctccatataattgggaccgccatcggccgactctggctgtggcgtagtgtccagatcttcatcgagaaactgaacgcttcgaacatttatgagtattggaacgcgggaggtggagaaatttggggcatgaggccttttgtattcgtgcctgctgggtttctgcagagggtaacggattagttgttttgcttcagagcgggatgtggcaaactactatgcagattgtcaaccgtgctaatggaatgtagcccagaggtactcctgtcattgacaccccattttcttgtgtcagactccttgggccgccccgcttggtcgtcttgcgccgcttggtgggacggtcatcgcattgctggaagagggggtatagagactcgagagtcgcgtctagaataacaatatgtcagtgctttgatttcgtcaagacaaccaggaaacatgattgatacctggtagtgtgatatcttctgcaacgacactcattttgaagacacagcctatcctgtcgccacaatgaagcgttgacaagaagagagaactttacatatgtatcggataatgcctggcacttgagacctttccccttccattttagtgctcacctcttgccgctttttgatcactgagtaaaactgagcacgtctctgagtatcccgacttgatcacgagccattacataatcaactgatctgctcactgagcatcacctgatcatcccgtgagcaccctgatccactcactggtcatcatctgagcactgtgatttgatcactgagtgctcaccgaccgacagctggtcgaatgtaacattcgaccagctgtaagcccagtgctcactgagtgttgtcgcgccggcgacctaagccttcctcagtcggacacttgcacctgcctcattcctcgaggaaagagcacccggtacacctggccacaacagctcccaccccgtaagtactaacactcttacaaaacaccacttctacagagcaccgctgacagaaacatgagcgatccagacgcagaccgcgccgctatgccgcggccaccatcccccgtgagagaccgccagcgccgcgagccccgctcgcccaaaactccccaaacccctactagggcgatttcattgccagcatcggagtcgtcaagatccgcttcacaagcctggagtcacagttctggcgtactctcggtcgccactaaactggagctcattcgaatttcaggaaaaaactgttgggcctgcaccacggccgacccccaagcctgccatgtgttgggaaaaagagacacccaagtgagtgtcgctggcactaactactcgagtagtatgtggctaaaaattactgtgtaggacaacctctgggcccacttgggccttatcaactattccctcaggtcattatcaaacgcgattctgctctgtgcctcgtgtcatggacaatttgatagagataatgacccgggtttccttcttgttccgactgacttggatttctttatcgaatttgagaaagccgacagaatccgaagacaggcgggtagatggcctcccggccgacaaatgccaacaagtggcatgtacaaagaatacctcgagagctcgggcaagggggatgcggggtataccccaatgtttctgaaacattacctacttgcagggtctggagtgacccctgaaatgctccgattgacagcacccaagtactggcaaggggcaccggccgcagcactgcggcgctgcatcatggccctcgggagtggcagaatcgtggctctcggccaccaagttacacaacttgagacgctgagaaatctttatttctctcccattgaaggagcgtcggcaatcaatgtccatagttgcgatctggagccccagctagaccctccacagttccaagatcaaccggcccaaaaccctgatttggaagaacccaaatccgaaccagactccgaagaccaagactctgaccccgagtccgaccatgatacatacgggccccactcaaaagagccggatttcaatccaaacagacagcatgataaccggaagcggcagggaaagggtaggaaccagcagggctctaggaaacaggcgaagcatgcaccaggtgcgaccagacatgctaccggggagaattgggccttaggccccagcgcaacaacgcaggatgccatattgcgctattctccaatcttcgcccgcggatagagccatccgcctccctcctccctcccaatgtcatccgcctctcactgccatccgcctcccaatgtcatctgcgcacctaatgtcatccgcagcccactgtcatccacctcccactgtcaaccgtctcccactggtatacgcagcccctgttatccatatcacaatgtcatccgcagcccactgtcatcctactcccactattatctgcagtcaatgtcatccgcagcccactgttatccgtatcacaatattatccgcagtctatgttgtccgcagcccatgttatccgcagcctatgttatccagacggatttctgacttgctttttgctagttgatctcatgggaatgagtatgagcaatggtcaggcttcaaattgaatttgtttcggggcagactagtgtctaccccgcactttttgcaagtggagaacatgtaacttagtaaattatactacagtctcacagcaaaagttttagcaacactgacaatgtcttcaacccggatcggcccgcgaaggaccctggccccacctagataccgccttcctatttaacctacaccgccatacgatacgcggtataggctccattccatatagcgcgtatatctcgcgtttctctctctaattccttgcttgatactggtagcaacagcgcagcaggcatgagataaattggagctacggcacttagagcatctctctgagacaatgccacaccgggtggaggctatcatcgagagccaggggtggtatacagcatattagattccatagtatgaatttatggaggttttagaccggcagtaacttacataatcaagggggtgtggggccaggcgttgttaacacttttgcgtagtcactgtaattggaaccctaaaccactgtatcgccgtcggatcggaactgaccgatacgaaggtcaagcagctgaggccgtcgcgttgataactccctctttcattcctgtgttgtaaattaggaacaagctcaccagttcggaggatagtatcacgggctgctgcccgaagtgaagagagatcaggttatggtgtatacttctgtggtaacttccctctgttccttttgaagaagactaatcagaagccctatatctagcctgttccgctttgtatataatgttgtaaagtaatgattcgtgtggttactagctgagccgttagaacaacgaacgaatggcaattcctctcctactacattctagttattagaggctatatattagtaaagatatagtaaaaagaataagaacgaatttacttacctggtggttgaattttccgtagaccatttcgcaggtagcgtctgcttttttacaagcttttctctccaaaaatttctgtcgaagagcatcgtagaaactaaatagttgttagctactaataaaatattagtaaaataggtcgcatacgctaccgcttcacgttagggttgcgaatattggtatgactgtcgagcatccctctttatagagaacatacgccctacaagctcttcattaacctctgtatgggagaggttacggagatagtcgttaagatgaacacagtgcttcatgccggaatagtaagatgctgtcttcgtgacttggcaaccaaggaaggagcagtaaatatcactttttccgccatcacgcctactagcgtactggacctagtaaaatagttaataactagtataatatcgatgattatataacaacttactagattaagtgcatttttcttctcttatgaagagagatgtcggagattaaccacatatgcatagcctttcggatgagtacgcggatattctggaaggagaggtacatattcaatctctgtagtagatattgcgtcgtgggtagcttctgttaggggagttggttcatcttccgttccctatttgaaaaatattagtaacaaaccagtaggaaactagtaaatttcttcaaaaacatacctcgtattcgttgcgctcatgcaggatccgatcatcggatgcattgtaaagctcgacatctgcctctgcaggctcgtctggttcaggaataggctcggcctttataagctcttcaagcttatgatagcggtgtttccaccaggtagattgataatgcgccatggtaactactagtaaacgaattggaacaatggtttgtaagtagttatacgtgcatatccaaagatatatatattcgatgtagagttatttatcagtaattaggtagtaaacaactagtaaataactagtatacaagaatgtatcccttgtaaatataccacatatttcataccaaaacgggatgatctaatcaaagataccgtacatttccagaccaaacagcatttacataagcctaaactaggggtatcaacgtgagcattgaccgcctgaccaacgtgaggtctcaggcgggcccacatgacctggtctctcccggacgatacctgaggcggaagacacctgaggcatgcggaaggatgcggccggattatataagagacggctgtgtatgatcacatgatccataaccttattagaggccggaaactccattcatacttagattcctcaagtatcttaataacagcattattccttatcgatatcattatgactttagtattagacctttatatttaagatacttcctctatgttggtaatttgaggggtggtgcctctaaattatcgtattataagtacaggcccgttcaacacagcgctgtacggtaagattggaagaaggcttggcatttattcggctgaaatgcaggaactcctcaggagatcgcatgatcgagatcaagatcggccacgtttcccctcttccataaattaatagatcagattgcacctttattatacgcaatcttcctcgcttagagattgtattgttacattcctttatgctaatctcttgttattacgttattgatgttgtttgttattaactattattgtaacattgttattaatgctcaatttgagcctcgattgcttaaatactttggaagccaatttcgaatgttgctgtatcattgcagacctggtcctcctagaagcaagcggtcctcccttgtgtccaatggattatggatctctattccagtctcactaaccttcaaagttcaggctcagtttcaacagctatgctatgggctacataatcgtccttgcatttctgatagatttccttgatacagtgataaggtgcacttcagtatagtatatatacgttatacaaattttaaagcactggaattcattttgttttattaataatagtaatggcagtttttactagacgatacggtttctgcctaatgaaaaaaaaaaaaaaaaccataacaaataaacagacgagtgcattcctcgggattatacctgggggtgtgttggatatggtggtcacctgaccatcagcccggtacggcaggcaccaacccccataactagatagttaggcattctgccctttaggaattgacaactctctccctcttcaatcgcatcactacactgtagtcgcatcagtatataatccagtagtatcctggactccggtagtaggcttgagtgaatacagaccggcgcgtgttgacggagtcacgatggaacctatggtctctgtggccatggcaagaggactaaacccagcggctacagcgaccgcagagccagtggatgaggccccgggagtctgcttagtattagcacaaaagaatggcatctttatcctctatcttcccaacatacggcgacagagtctgaccaccgtgagcagaccaaccgggcatcatcatggtcattttcataccagcaaattcctagaacaacgtcaatccaataaacttccttattaaaccgaacatatactaacagtcatgttagcctttcccaaaataatcaagccagcatcaatcagccgctgagtgatagctccgttctttgacgccttggctcctacgaacgcatatgacccagctgtggtgctcatgccaagctccgatgctgtgacaaagcaatctttcagaactatgggaattccatgaaaaggaccccaggtttgtctggcgctcctcatcacgagccttggcggttgcgaggactttgtcccgtggggcaggagagattagcgcattgagtgcaggctcatagcgatctatttgtgccaaatactcttccacgtcctgagcgctcgtggtcttgttctcatcgagtaggcgctgcaggtcgaccgcattggtcgtgaggacgttgatggtcatttctgcgctggaacttgagattcaggtaaggggcaaattttgttactagtgcctttgttggtgatattaattgtagcatcgtgtgagtacgtatatatagatcctgctgcctgattgcggagcgaagcgaagcaattatatcgcattatttattctggtagccttaagggtagttactgataacatattgatacttcgagattaccgaaacgttcacccgttgtcaccgatggaggcaacatctttgtatcaaagccgctcgagaaagcaactcatctagctcccacattgtagcttgcaactgtgtggatagcaagtggtgaaacttagtggctaaagtaggacacacagcaattgatcaagtcccaggcaccagaaatgggactggaattttctttcaacatactagtagggatctttcgatctggttgcagttcggttgatctgaggcgctggccccgcacgggagcccgatggacgacaacttgaggatcgttgaatttacattaactagttaattgagtatcattgacagactacacatagaatatgaggacctgtagaattgacgacgaaaatgaccgctttcaacgctagaaaaggatacgattgtcacgccgcttgaccaaaaatttctctcgtgtctgatcagatatataagaccttttgatgcctagagtcagtgccaatacaaccaaatcaggaaataataggatatttgagcaggtacagatgaaaggaagttgaatatagactcgaaaattagcccgctacgtaactgcatacatggagcaaccaactaggaactcgcctagatattattccgtaaattggcgaatccaaaaccagaatatgcagtcacaattagataagaatcttgaaaatatgttactattcctgtctatgaaccataataaccggttggggcagtaatgagtatgacgattaagaatgacgtcgtgctatgttagacagcgttcaacctcaacataaatagtgcctgtttccggcgatatagaacttttcctatactcagcaaaccaagcaaaacttactacaatcttaaaccaatttttatcttctaatcttctatcttcaatatggataccgtcaaggttggtggattttctcacacctaccctaacacaaactcacatggatacagaacgccgccaactatgttgccgagaccgtgcagggaactggcgctgaggcttccaaggagaccaacaagcaagtcgcaaaggatgacgatgccaagctgagcactcgtgccgccgctgcgaaggatgctcttgtcgacaagaaggatgagaagtctcacgatgttaaggccgatgttcacaagggtaagttcatacacctgatacctccatagtcagttacttacaattttgcagaacaagttaagcatcaaaactaagggatattgtttggtatgggtcgatgttacagtaccaattgctctcccctaatcccgcgggtcgggtacgaggcatatgttcatagtactagtagaagaatacgcttgtttttgagtggaggatgctgttccgccaatcacattaaatgaataccctacttatttcatttcaacgaattggtgctttaataggtgctttaataaccggctgcaagttattttcttgcccgaacttcagctttcaccactataggatttatactatttgtactatgtgtctatacttatttattctactgatagcttggaaagcatggttgaagatgcatgtcggcagttgatcgtttaccaatataattctcttcaaacagtcttcacacaatatatttctatatgttgcgggcttattgctcgcgtctgaaaatctatatcgatgatacctattctgaattcggcttattatttcgcgagtgaaactcacgttcctaggattatatccggcccaaggatctatagtatggtttctaggcacgctcttggtcgttcctaggaatcggactcgtagtatttctagaatgtacgatcattatatcgcacatctcaaaagatcgatcgattagtggtcatctggacaagtaggatagcttatgacgtaatgtctataacggcctttcagtatcccttggcagtgatatggttcgatgacatcatggaaaaattcgatctaccgccaagagccatcgggctgtagaaactcccattggacactgccttggaaatcaccctcgggctctcttgctgtgtaccgaatttgatattatttctaaccccttgagaaagatgttctcctccaaacgcctgaccgctggattttcactatggccgcgtccgaaggtgctgctgtccagtcacactatagattggcccaggaacgggaattctacaagtaagacctttttcatcctggatcgcgtccccttgtcctccacaggtgatacagatactgactgatatggcattggggcagatatgttccgcgcgaactttccgcatcgcattatgccccctttgatcatgccagcgagaaaacgttcatcccgcaaccgtcgcgggattcggccatgacctccttcgcccagctaggcgtcatgcgtctaggcacccgacgagccatgatttctctattcgataaaacccaccaacatgtcgttgcagaggcaactcggacattgggactaatcggtgggagaatccgagacgaacacgaccggcttcggctaggttgctgtgtgctcccgaaagagaggggcatttgccagcacgtcgaagatttaccctctaaggaatattcagaagccggcgaggtcctcgaatctcgttcgctggttattttggatatgacgcaggacgaacggttcaggtcaagtcaactgccgcacgcgttgtctgatgtgcgcttctatgctgcagtgcctatcgtgagccctaaagggttcacgattggtgcctacagtgtgatggaccacgagccaaggacctcgggtcccgatcaacatgatctgcagtttatgaaggacatggctgcaacgatcatggaacacctggccatggatcactccactcgcaaaagtcgccaggcggaacggatgatcctcggactgggaagtttcgttgagggcaggtcgacgcttcgcggatcgtggcgagaagccaatgcacagtatgtcgcctccgaacagtccggggagaccaccgagggtcaattgaatattcagcaacagaatctgcaacaggtcgccaaggaaaagattgagaaggaccttgtcatccgccagcattctagggttcctaccaatgattccgcatcgaaaagtgatagcaatactagaggcagacaacagccgagtgtagaggtcaacaaagcggatgggtcggttcgaagcgtccttgcgggcgaaagtctacaggatgactctcttccgaccggcatcaaacacgttttctcgcgcgcggccaacttgatcagggagtcgattggagctgagggagtcatgttcctcgatgcgaatagcaaccgttttgggagtctcgtcaaacatagccggaaggtttctggccccagcttaaaaagtccgacatcgagtagtgacgaaagtaccgattctgcgtcttctcaacgcaactataccaagggtaaccagaagggtgagaagaacaggaatcttgtgtctgaatgcatgggcttttcgagctcgagggtgtcgagcataaacgaccagatgagggccggtcaagcagttgtggttccagagcctctgttcagctcgttgatccggcgatacccccacggtaaaatcttcacttacaacgccaatggaatggtttccgaagatagcgatccctcatggaatctgtccgagcctgatcacgtcccgacttccggggcgcctcgctccaaagaccgatccctcgccagtaaacggcgacgcaagccaacattccaacaagatgccaatagtctgataaaaatcttcggtgatgccagaaatattttgcttctacccatatgggactcggaaagaaaccgatggtatgccggaacactagtgtggacgaacgatccggagcgcgttttcaccattgaaaatgagctcgtgtacatctctgcttttgttaatagtatcatggccgaaattcgtcgactcgacgtggaggtggcggacaaggctaaaaccaaccttgtcagcagcatcacccacgagcttcggaatccactgcatggaatactgggcacggcagacattctgagtgacaccgccatgaatgctctgcagcatggtatggtccataccatagagtcgtgtggtcgcaccctccttgataccatcaacagtctgcttgatctcacgttcatcgacaagtatcagaagaaacggtctcgcatgagtgggaagccgggagagaatcaatcgagtttaccggccacttcgaccaaggagggtcgcatgcaaagcaaagaccgtggcgagaatatttctttctcccacgtcaaactggacgcgattctcgaggaggtcacggagtgtgtgttcgctggatacagcttttacaatcatcccgaggcgccgcctccagccttggccaatctttcttcgcggtgggctggtccagcgagcacgtcggatcaggttggccctcgagctagccaagtcacgatcattttcgacatccagccagatacagaatgggacttctggacacatgctggtgcttggcgtcgcatactgatgaatgttttcggtaatgcgctcaagtacacaccctcaggctacatctaccttgggttgaagtcatcccagagggacacagagtctggtggagaagtgccgaatgatcaaggagaggaatttgaggttactcttacagtgaaggacactgggaagggtattgggcccgaatatttgcaaagcgaccttttcactccgtttcaacaagaggattcgcttgcgtctgggagcggactaggactgagcattgttcgccaggctgttggattgctcggcggctcaatcgaaattgaatccacaaagggagttggcactcagctctcgattcggacaccactcaccccgtcatctggtccagacacttcgtcaaccggctctacgtttagttcaccacggaaacatactcagggcaaaacaatcggactcctagggttcgggtcatctctccgctctcaacgagacatcgtcttgtactcatctttggagcggctgtgtcgggactggtttgatatggaggtgacaagcgtatcgtccctagagggcgaaaacgtctcctttgacttttacttggctgtgcagacggaattagactctgagcatgttgaaggaagaaacctgttcaattttaaaccaggtctcaccaacggggatggtcgcagctcaccggttgtggtaatttgtcaatcacccgaggaagcacacagaatgttcgttgcagccaagaaccggggcgaaacgcctctcttcgagtttattagccagccatgtggaccccggaaactggctcgggcattggatatttgtatcaaacgacaactcgaccaacaatctggccggcctaatactgatgagccgactcgctgggtagaaatgcctgagtcctcatatctaccattagacattgcagctagtgacccacccaaagataggatgaagatcggtaagcgaccaacaacggagacgatgcgcagtccagaaagtcggatttctcgatccccgtctcacaagggaaatttggaagacgatgcacatgccgcccagccgacctcgccttctaagatagaggcggaaccagagacccccggaccatccgtccttctggttgatgataatcatgtgaacctccaattgctttgtgcctacacaaagaaggacaattatcattacatgacagccaagaatggggaagaggcagttgaagtatataaagcacaccacgggaagtttcgggttgttgtcattggtatgttcaaagttcgaacttttctttcctggatttggtttgatgctgatcaattagacatctcaatgccagtcatggatggccttgaagcgtcccgacaaatacgtcgcttagagaaaggctatcgagccaagatgaccgaatcggaacaacaaacaacgccccccacagtcatcgccgctttgactgggctcgacagtattgaagcccagaaggaggcatttggttctggcgtcgacactttccttgttaagccagtcaagcgccgagatttgcaggccattctacggcgaatgaacgtagagtgagctaattagcaccactttattttgtgttgtcctcacttaactgcttgaggcccggggcctcgatgaaaatacaggctgttatctcaagccgagggaaaaggtattacactagcagacaccctttcggaaggataattctaatggagtagtctagcttatccctctatgaagcgaaatccgattctgccaggtcaagagtggctagacgtttacgaagatctccacattccgcaaaggcctcgatcattcatctcggtaccgactttctcagcattctagatacctacccagagtttatcaagattttacagcaactggtcagttattctttctctaccaattccaattcgaacacaacttcgaatttccacaaccataacaacctagaacgtctgtatagatctcaccgtcggttcaatcaacctagaccaagcaccccttgaagctagtgacgacgacgatagattcgattacgaccctatcgtcagtctctcagtatctagagagatagaatagaaaagtaagagaaagtgaggaagagcagcgaagtaggttattggggcgctaacccaaaaaaggcaacactaacttgaaaaggcaattcacaggtccgccgtttagttacatggtcaatttgatactaacaagattagattagcgcgaaatattccctcacaaaagaagcgtaatatctccgagaaagagatgaccactcagattacaataagagagacctcaaagagccgtaaccctctcatcctggcaaaacgggcatgcagtgaagtactctgccatgtccacctggatctgccatttcgcaaagcaagacaaacaagagaaagactggacgatacggacccttgtggatgcagactggggcaaccacctctgcgagagaaggacgagatcggtagcaaggccgggggcttcttcaagcagtttctcgaatcccttcttctcgcgcagctccctccggtgtatctgacaaaccgctactaccacatcccgaagacctcgatccaactttggtgttgttttgtatgcctggaaagcagcaaccaagaattcaaccgagtcccagtgatcttgagcgagagtgacgaatgttagctttgcttgaactttgagatattccacctcgaatttgtcggcaatggagtatactttgacgttgaacaacaggggacacatttggtgctcgggttcgttgatgtcgtagtgtagtccgtagaaggagcgtatcatggcttccacgacgcgtggatgctcgtcctttatttcgaatacatgagcatcctcgtcgctctcctgtatcattaaagtcagctgggcgcgtggataatgaagggcttgggctttggaaacatacactggagagatcagcgaaatgtctgcagaaagtctcagatctgctgcagactacgattcggtgcacgctcaaaacttggtcagcggtgtagattgtgagatcggagaagatgcctgtacggtggaaactgtcttctgtcagttccctcattcatacaatgtgtagactcaagaacttactttccaagtcgatggacaaaccgatcagtgccctcgacgctgttggaagtgagttccatcgcgaaggcgtgttgtggctagctttgatgcgaaaggaacgcgaagggaaatatgtgaagaggaaaggtaacgttggaaggattcagacctttttgggtaacaacgataagtggtgtagcttttgagcctcagcttgcaaccttcaaaaggcaggcacagcttgttactgtatctagtttagacatatagtaactaaaccctacgcgtcttcggctacggagatttacacccctcatgtattccgtgggacttgtcaaatggcaatgagagccacgacttcagaaacgtccacgagaaagtccggttttgttgtttaatgcagacctacatggacctcatacatatggtaatgtcatggtccctgtggtaggtgaagcagcatatgctacggcaccctctgcctgcgctgtctcttgagctacggtgaaatggtggtcagagagatggggaggagagaagaagaagagaagaagagaaatggggggaggaccccttttataccccaaacccacgtgccttcctcgagtgcgacaggtccctcgcatcttcctgtcaatggcacatggcaccttccagtttacattgtttgccttttttgtttatacggggaacttccaaggtgtaggaaggagccatgaagccaatatcacattatgctaattccttgtagtgcaattttaagtaaacactatagctgagaatgcaccttcatattatgccattttctctagtttacaagagctccaggtccctttccaagtatcgccctcacactgtctctcccagtatccctatgatcttgtggagaagaagccgaggtcttgctatcagggtcgatgtcatatacaacggtaccattgactgcatgaacagatcgatagtatgaccgcccattcatctcaccttcgaagacattgctggtgtcaccccaagagcttgagtttccaccagtgacggatttatactgcgccgtgccagattgacttgtgtgtaggtatgatggccccgaggtcaaggtgtaagtagaaataccgagacctcctgttgcctcgtaatcaagacccctcttcatccaagagtcaatcgtcatcccactcgaggtgatgccataagttgcattgacagccagggggtactgaaacgcaatgctgtttgagatgggtgtgtctccgagctcggtaatggtattattgccagttgtaatttgtctgttaaattgactgtatccttgctggttgaggagaccgtggttggagaaggatagtgtctgtgaccacgagtacagagaagaggatgctctgaaaactcgctcgacaaccacagagtacgacaaggaatcatttccgccggtctcattgtagataagattccgagtcacagcaaacataggcaagggagcatccaccgtaggtccatttttgtcaagagtggcatttcccttagaggctgagctgtcgtcatcgatatatatgaagatatttcctgtgacaacccaatatgagccgacagtgttggcaaatgtggccttcccatctgccgagacatccagaccagtcacccggatctcaaacgagtgctgctttccgtcttgaatcatggggagaaatggggaaatatcaatctccggctgtcgaagatcaaatgcatcagtgccaacaaccggacgccagaatcccggagccacgcctcccgtaaagataatagggaatggccagacaaggccggcaaggatcccatcgatatagagctgaacttcacgaaaaggagtgtacccatatagcccaccgacagtgctttcaaagtcttgggtatcttcagaaaagacattggaccaccagaactcttcttctgattgtccacatgccgatattgacacaacagcacgcgatgccgcagcagggatctcgtacatgactgttgtgttgtctgtgggaagctggaatgcacttggagagtttgatgccgactttttggccgagattggaagaatcatatccgcagttttgacattgtgttctccagagaagtgcgcggttagcgtggcattgaacgaaccggtataaatgtcgttgatgatatttcccaagtcaaatatcagcttctggggactcttccatagtgaattatactgtgacatctctttgacataagtccagacgatcccattgattgtcggctctgccgttgaagtccggaacacttcattgtctccgaggtacatgagtgccaggcggtcaaattgcttcccccgggaggtgactgtgagattgattcgtacagtatcaaagtcgcagtttggaggctcatagtcgcctaaatagttgcaatattagactacaagtagaagtaactctcgagacctcttaccaacaaacggtgctccataactggctccaaaaacatgatccatgagcaatatgtcgacatcgcagttgccgtttccactggaatcgagcgatattggctgatatagctggaaaaactcctgcaaaccagtagagctaggtgcctgcgatgaaacgccagcaatggactgtaatccgcttcggagcgaggaagccgatgggagatgccccaaaagcaacaacccacatatggcgaacagaaccataataactagtaatccaaagcttggattttctcttcgcaatttgctgcgggtgtcgtctacccttatttctaaatcgtggtggtcaatagaccgcacagtgtccgcagttgtgtaagcttcttggggcttcaatgcttcttgactgagtaccgacctgcgatgcgatttgaaaacattgaaaaatgcgaccgcaatgcagaaaagaataataaataacaaccatgcagctagctgcgtaaaacaatactccattgggaattgggggtccgttggcggttgaaacgagtgccctggaggaactagcatgttagctccgcccgtgtgagccagttaggatattagattctatccaagatggtgccaggctaaaggctatgtaaccttggaagtgactcttgcgatgcaatatatgaaggatgacgttgctgaagataagatgcataaagaggggaaggtgcggcggagttccgacgcaagcccagggctagctatgtaaccctaatatcactattcatacggagtaatgaacggttatcagtccgaatattgatagacctcaatgcttcgaccttgactgttaatgtcatggatatttctcgggaggtaaagtcttcaagaaagttgtattttgcaacaagataacattattggctaatttgacagctgtcacttaggtagaccattgtggtcatttttgagttgagcaaataccaatctcggcacagcagtctatgggaagctatatagatgaaaataattgaatccaaccccaagaatgacagaatctggccgcccaccaggcaccaatcacatatgtgtacggctttggggcattcaacttctggtccatcaacacccgccactggggccctcagatgcggagagaaaggatggccgagataccttgaaaaacgcgatcggagcaatcatagtgcacatccatccattgccgatcgcattgagcatgggttgagtgacgacggctctagtgcatgcaaggatatttcgcacaaaatttgccacagcaacaccgctagatgctttcttgggagtgaactccgtcagagcggtctgcacagtgcccatgacaagcatcatgccgagcccgaagcagatagaggcgacacaagggaccgcccactgcacacccttttcagcggaccagccgtaccaaatcaacgaggctggatacagtgtcaaagccagccagatattctctctcatccggtcctcgggaaagtacttgatcatgctgttatcatcgtagcgattgggcttggttggctcacgaaccatgatgtggttgatccagcgaccaccaaaagttgacgagatagcgtactcgattgtcggtgctaaatacacaagacccacctccaaaatgctgaaattgtagagggccttgccgaagacggagacatccatgatgtacatggtaaagaaggcgatgacgccagaccaaattacgacgatgacgggctggaagcggagcagggccaatgccttgaacgggccaaagatggacatgaatattttgacgaaaatgctggtgctcttctgcttttcggtctacggctttggctcacgctttgcgatcgtctccggcaaacacaggaaaatgaacttcagcatcacaccgccaaagatggcgagaaaccagagggtacttcgccagccgagaccctgatttaaagcaccaccgatcacgggcgccagaccgtgcccgcagagagggcccagttggaagactcccatagctttggctcgtgctttcggatcccagatatcggcgacggttcccacgcccacggattggacggaagctgcggctccaccgctgagcactcggaaaacgatcaacattgtgacgttgacactgacggcactgatgcaggagaaagtcaagaagagaaaaaatgagaggagataggtcgttcgccgtccatgcttctcggacagtgcggacctatacttcgtggttaacaagggtagctctcatttctcaatttgcaggtctacttaccaccagataggagtgaaagccatggcgagcaagtagagtgccaccgacaagtttgcaaccgtcggagtcgtatcgaggtcatacgctacctcggccccgctgtgattttatcaatgggtaatcatccacaaggaaacaagcaatagcacccacggaagaagatagaggagcccgtggaggaagtaatggcagcgaagctgacagtcacagtcatcgcccatttggttccattcccatattcacgcgggttggtgatttcaggaataacggagaatccgcccagcaggcctcgccgccccgagcgagggacaacaacaatctctggtcctatagtgctcgctattggttccactttccctggagacttgatgggctgagtgggcggagactctgtggcagacatttcaaaatcgcggttgaggttgagattgttgatggccacgccatggtccttctcgtcactcggcattcttccggtcaaaagtggaaattggtgaatagtagagctgggcggatgccacgatgcttatacccaggcacattgtgtatacgggttcttcggggagataggtcatttcccaggacagtaaagccgagcaagaaaatgccggggtggacacaggccagacgattttagaccattgaagaatgtgaccatgatgtactccatgaacgggagaaagccaaagaaaagaaacgaggacgtttgatgtccgggcgccgctacactagtgagcttggtgcgcctatcgccggggctgtgcagatcccttgggtactttaagtattccccggggccctccacgcggaaaatcaatacatttgaagtcgcgagaccgctaaacacgaattgtgtatatgatgacacatatttccagaaagggagaccgacaagacataggagggaaaatagttctgtggggatcaagatcgtactgatagataacaagcatcagtagctttctccatggagaattcggcccggagatactaaccagaaaatgccgagccgaccctgctgggtacaaaaggtgcctaacacgctcaatattgattgactctgagataacccgacacgatgtccgcttcacgccccacgatccttatcatcggtatttcacgtggccttggccacgccatggcggtcgaattcctagaaaagggatggaatgttgttgggacagtccgcggagagtcgcgaaaattactccacgagctagaagacaagtacaacggtctgattgacatcgagaccttggacatttgccaacccgatcaaatccaggcgctagacaagtgtttgtcgggaaagatattcgatatcctctttgtcaacgctggaacaacgaatcgtgaccaaacccaaaaaattggcgatgtatcaaccgaggagtttgtacatgtcatggttacgaatgcgctcagccccatgcgtgtcgttgaacgtctggcacatcacgtggctccgaaaggtcttattggtgtgatgtcctctggacagggaagcatcagcaacaatgaaaccggtcagcgagaggtatatcgtggcactaaagccgcgctgaacatgtacatgcgaagctttgcagctcgtcaggccccatcacgtccaatggtggtgatggctccagggtgggtcaaaaccgagctggggggtgcggacgctcggcttaccatcgaagaaagcattcccagcttggtcaatgtacttattgcaaagcaagaacgacccggactcgaatacctcgactacctcggccgaactgttccttggtgaaacataatcacgtggctatatgagccttcatttttgttttggccagagtctcccttttttctttcttgttccttctttagatgtagattctaaatcatatcaaccgtgtttctcgatcagtactcactagaacaccaatccattattgtacatctagataaatcaatataacactaatttaaaggctatacacagaaaagtcctctgacggtttatgctttttgtcggtcttatatatatccaagaagacatctacgaagagattcaaaaagacattcacaaagacgactacaagatacgttcaacatggcacggtatattccttatcattatcttgatcttgcatcaacccactattgacctttggtccttggaacgctctgagctcttgttttggaatctgagaattccgctggagtccgtataggctgccagagtagttctgtcgcctttttttcgagacagctcatcaaaacgcttagtgacgacacatctcttgtcatcacgcttgaggcagtctgcctccagacgagtttctacggcccactcgactgcgaagcgacgttctcgcgtcgtgggtacattgtactcttggtgtgtgctcatttagatgttcaacgtactctcagtgtgcactcagtgcgctctcgctgagattttcaaacttaatctcagtgtatgctcgttgagatgctcaatgtgccctcgacacatgatcattgtctgctcatcgagatgcccgcgaggcacgtggagacatggtaggtgtcgagcggagtgtccgaattggcgcaagcagaccttttaccaaggactcagcatgatcgtgggtttcttgatctgattgtaaacactggagatggcggacgaagttgactctgtcatctggcggaaggtgagtgtggaaggcttgcagaactcatacagtgttttcgttctgactgattggttggtagctgtctactttctccatcttgccagtggatgttgttcttagagagatgctgttcttagatccagagtcaactggaacccaaagatggtgaccggagctcaaatgggtggggctgcctatctgggtatagctcccgcattagttgcagatcatgtgatatataaaacattccgaatgcggccttatcacgtaacctttttttctattttggtcgtctctttggtcgtcttgtattggtagtcttcttaagtcttcttagaagtatgaaggcggtaaaaagcataagtgcttagcattgtctaaacctatatacagcaacatacatagtacggccagacgagtagagagtatagtgtaaaaaagaaagagaagttgtaagacatcaaatgtcctctgtaaagcaagctaaaaacaatcactccatatccaatgcagaccattgtaccaattcacataaacaagcgccaggcaccaagaataagggccgcggtaccggtacagacacccctagagagagaaagaaagtcagcataatctcgcgcggcaagatagttcggggatcatacatgagccactgcaacgtcgagaacttgacagcctcaactcgttcccttaatcctgcaacctcctgttcaattctcgtttcggtctccttgatacgcatttcctggctatttgcctcctcacggatccgacccttctcaaggttcagatccagccgaactgaagcttgtgttcgtccaatctcgtcccggagccgggagttgagtttggcgaggtctgccgcgatcttctcgtgcgatgaacgggtcaattgtgcctcggtcgagtctgcgttgagtagctccgagcgcagtttggcaaagtctactttttgtgtataagttgatctctccgagtctagcaaagcgtttctcgttagatctccggcaagcactataaacgatgcgcgacagagccgcgttcacataccttctcggaggaccattgtcctggtcagattctggattgactcttggatgatatcgttcaatacccgcatcattgctacggactgttcctcgctgaagccctccgcctgtaggcgcttcacgaatttcagggtatcgaagtgatgatcgcggtgctggactgctgtcgcatgaaaggcgcggcgagcaggatggtagctagccacatagaccccattgtgtcggattggattgccgcggtgaggtttgggcgttgccggcgtggttatagaggttccgcgggaaacaagatatccggagatgacatcccgggacgatgtggtgatgagccgggaagactcgaaaggtgggattagagaattaaattgtcgcttggaaggactccagccttggggaagtggtcgtctttgacttgtcgcaagcgcgggctggtgggtgatggtaatggatggacgcgaaggggagctgttccaactcaggcggggaaggatagtgcgcgggacatccgcgacatgtttttgagacgccatgtcaaggacagcgggccaacaagtatttgttcaacgagtgtactttaaaccgatcaagaatgacgcagaagagggaagcttggaagattccggggcttgaaatgtcgggatgactaaagacctcggaacgcttccagtttcccggcccattacccgcattgcctattttattgtggagtgaggtgtattctcatttcatgcaattgaggactatttttatcgaacttgactaaagcttctttcagaaaatatccaaatcagacttcacatgtaaacgctatcacaaatctatgccttttcggctactgtcaacctcttatctataagtcaaacagcttcttcatctgcttgatggtgtcgtcaggaccagtaacggcatgcccaatggtgcgagggtcctcgtagatctcataatcgtttcctccgacgcaagtcttgtcgccgaagaagtggatggtcttgtagtcgacacccgagatgcccttttcagcttcgacgtgctgtaggcagtaggtcttatcccaaccggtagggaagacatcgaaagagatctgaccgccgatagagtagctatattagtagattgattagtaccatattaaaagtaaaccttgccggacaaagacttacgtgagaccgtagtcggggaactccttcctcaaggcctccactagggtctttctgatgttgtgaatcttgtcgaaactatagcataggtcagtcaggcagtccatttatgtggacatatagaagatcagcccgtacgcttcgaactcagcacgctcgtcggtgctagcagcacgtccaacagggctaacattaaccattccattacggaactcaacgaaagtaccgcgcttgcgaggcaacttggtgttggcaataaatttaagaatgaaatccaccagtgtttggtacttgtcctccccaagccactggatgaagttgttggtagcaagcggcttgccgaggcggaatgcggtcaggccgttttcggagaagcagaaatcgaacatggtggtgacatccatggtggctgatccaagttgttcttgctgcttcacaaggttcgagccgccaacctacatcatgttaggaacggggtgggggtattgattgggaggagacgaacgtatccaatggcgcatttgtggcgcaaccgagagagcaactcgagcatctctggcgaggcatgctgtaatagaattcgttagtataattgaacaacaaggagtctcagtgcaacgtacccgtcttgcgggggtgagagtctcgtcaacatcgaacagaacaatcgtgttcttcatgggacggtcctccaacgaggggtaaacactggtagcttcagtcattttgaaggatttattcaattgagtctgcaaagaccaaaattgcgggttactcgggggtaaatatagagagaggggtccattttggccgcaagcggtgagtgaaggcggaagcttagttgggtccagaagcggaaggccacctggtctgtttcactgttttggagaaaccttggtcgattagagcaagtgactcagtcagatcattgatctaaatcatttccgtcctggagtacacgatgttgtacaggattgacagtgcgacctaaacccgtggactcttttaagcgcctgactgttatcgataagaaacggaggggtcaattatcagatctgaaggagtttggaaccttggaaacatccatgaatgtgcatttgagaatctctaactactggttacatacctgaggtatatatttcctactgtacagtacaagtgatatatagccaaatagacatacagagtcggaatgtccaacccaacccaatccccacagagacctgtaagagcccagctcccaaatccagatcccgaacacgcagaatgaagtatacatacttagcgtcccatagtggactggaagaccttagccgctagctcacccaggagccgcgtccgatcagtgttcggcaggtccaaaaaagcctcgtagacacttttgcccttagcatcgcggaccgcgccgagacgattacccgccacagcgccagccaacgcaccaggaaagttgccaacaatgaagcccatagcaccaccgctgacaccgccaaccagtgcccagaatcgcccggttgagccagttcggctgccgtctccctcctcggcgagaccctcctcgcgtagcatctcctcgaatacggagccaaactgactgttgtctcgttcatcacggtttccaccgaatccaaaatcggaccaggagaaaccaccggtgggtgggacatccgcttcctcctccgctgcccgggtagcgtcatattcccggcggcgtgtggggtctgatagggtgaagtaggcgtcgttgatttcttggaactttcgagtgcgttcgggtcgctctggcgagtcgacggggactcgatcggggtgggatttcagtgattccctgggattggttagaggggcatttcaaagctagttgtgatgcacttaccgcttatatgcacttcggatctgttgttgggtggcattctggacgatgcctaggattttgtctggtatgtgttagttgggtcttaattaggcacttggagatcttacaataatcgggagctggtcaagagttagtatatatttcggtaagagggagtgaattaacatacttgacatggtcacacctggttttgattttgattttcaacagggagaatatattgtgctaaactattgctagactcgaagatgaatttaagagactatcacatgcagtgacgtggttgtcgcctaaccccgtcaggtacgtaccgtggttcaactgtttgttctatttgttttaaactacatcgatctatagactgtactccgtagtgctctattcatgttcaaacataatattgagatgattatatggcgaaatcttactgaaagtggatgtcttgactatctggggtactttatctcctgcagaatgaggtttaagactaagttcagccgaccataccccagccgcctttgttccgccaggggtggttgatcagactaatatgagtatcccctttgattcgcttgaaattagcatctagcattgtccacacccctcttacaatcccatttctgccagctgtcaaaaggacttacctgcatagaaaatccacaaagcggctgcacacattggcctagacctcagattgcgcatatccgcagcagctagtggctgacttgcatctgtctcttttcagtcttccaattgccgcacaaaagatttcagaggagattatcaggggtgtatcgttacccagcagcatctcaaacccgccttcctgtgtaccaacccaccgcaatccctctcctaacacaacaacccgttccccaaaccagacaccttatcgtctgcccgcagtacccacagtcgcacccgtaaccgtccccagctccaacatcagcatcagcatcccacatcaacacaatgggctggttcgacggtaaaaccagcgcagcttcgtcaacagggtacgcgcgacgccggtcatcaccgacacccagcacgcgcagcagacgcagcaaatccgcctactcctcgacgcagcatgcgcgctcggcgccgtccttcttcgggctaggcggcagccgaacaggcggccgatcgagtccatctgtgctctcgtcgttctcgtcttcgtcttcgcgccgggcccggccccgcgagggattcgtgcagcgcatgctccgcgacatcaagcgtctgttccgcgatatctatcgctgggcccgtcgcaaccctatgaaggtctttctgatggttattgtgccgcttttgacgagtggggttctgccgaaactgcttgctatgattggcattcgcttgccgcatgctgtaatgagtgcccttggtggcgcgccgaagcctcgtgagggtatgggtggtggtgagaggggtgtgtcggagcatattagcagtctcgtgagcattgccaagatgtttgcgtaggcgactgctctgctctgctctgctctgctctgctctgctctgctctctaggcctgggtaggctgttctgtttgcgcccgaggttcttttttttttctccacgatttgcaatgctctgctgaaattcagcacatgacgatcacgattatacacctactgtcctttgcgacttttctcgctcttatgctcctactcttttttttccccgttgggctttgccactttgcgatgttgtcatgaactgggaggcccgtctgaattcggtagaattgatttcttaggaaaagttgttgttttgtatgggcaatgaaaccttgaaagttcgaaaccagtctagagatacatgaagtctcctatttatactaaaccagtcaggtgttggtgcccaagcaggtggatatggcagcatcagacaggtacaccgcactgttgccagtgcactggccctacgacagacccgcctataaacctgccaaacataggtagatcttcctggcagaccgatatttggggtgtactagtatctgaagtatcaaatggatctacagggacgcagcacatattgtaccatggtaaacaatagccagtggctgcattattcggccctgaagtttgagatgggaaaaaaaattatgtgtacattttgtctacttcggtactgccaacatccgagcagagattctataaagcagcctcggggaattttgtgatctgcccggcaagaaagtggcgacaacgcccggtgcagcaatacagctgccccggtctatcatcgctgggagcgcttgccacgtttccgagagcgggagtttgaggtggcagtggtctcggcttcctcaaccaagggctcctcagcctcagaatccacttcctcctcaggagcagtccccaacacccgaccgacagtcttgttgaagcaccagattggaagcgtgcacaccatggtttcacggagagtagggcgttcaatctgatcaatgtcaagcaggaactcctggcgctcgccagcctcgttttgctcttccaagaacacattgccaatagaatcgacaatcagcgtctttccattctcagcaacaacgcgcttccgctcgccagtgctggcagtctgctcggcagtggaggcatcaggggcacgagcgctcacacggactcctcccttcttatccttcttgttctccttgtccatcatgcgcttctgacgacggttgacagccacggcaccgacgtcactggattcgggggcaggagggggaggcgctgcggcgaccgactcgattccagggataccacgaacgcctaattcatcgccccaggcggctcggcgggcctggcgaatgtagcgatcgacaaactcgcgctgccgcttccagctgaggatcaatgcggcgtagtgagcaccaccaccgaagactaggaacagacccaccagcacagagcccagaccaggacggaagcgcgagtagtagtatccggtacccttccacagggggaagccattcttgaggaagtggtcataacgctgacggttggggccgcgcaggacgttggcgacgaggttcagacgagcggagcgggcatcggcgttcttgactgcagcgtcaatctcgcgctgggtaggacccttgttgacattgacgccctggttggacttggccttgttcttgtccttggcgtagttggcaatgaaagcgcgcttgaccttgtccgggtggatggttctagacttcttgcggtaggccttggtgatttggtcttgattggcattgggacgaatctcgaggaggtctgcagtgcgggtactgagttagatacgtatgccttaaaggagtcgaaaatggaaaagaaagaacagaaagaacagaacgcaatgctagagcgacgacacataccgtaaaaagtcacattggcaccttcgttggtggccacatcattttgtagaccaaagatctcatagtctgttccaggtcagtagggagggttggtccggggtaaacaatacccaccttctttggaccaagcagcgacgaggccgaagaagacgaagagcgagagaaaggcaaatggcttcatgattgacagcggtcaatgccgcagaagcagaagtctagaaataaacgaataagctgagtgttagtggaggacatgtaggaaaaaaagcggtcgggcgtttatccaccgaaccccaacgtggccccaatggcgatgtttctgcttggacgagtccagttgggctcatgaatgattgcatctgagctcactttgtacggaatacggagatggtatatatagagggatagagggatctagattctacgtagtctcattcttctccagaagacatcctaggaataacctcagggacccaatcctattattagtagggagtccctaactagctattccatctgactcgatgactcctggcctaaaactaaaacacgaaaggggaaaaggccaagaagggaataagtgattgccttgtctccgtgttgtttccggcttctctctttcctctctccactatacccatcacttttgttacctgtcccatttcccaggctttcttattctgctcttcttcccttcttcccttctcaaccccttcttcattcaaaatggtctctatcccaattgatgcgatcacctcgcgttttggcgatcgtctcaacaactttcgcagcacctctttaaccacccgtttcgccaacctgcgcccgatctccgagttcctcgacgtcaagcgcctatccaagcctgccaacttcggtgaagcgcagagtcgcgtcaattacaatctgtcctacttctccagcaattatgccgtcgtgtttgtgatgctcagcatctacagcttgctgaccaacctggtgctgctgttcgacatgatcttcatcagctgtggtatctacggaatcaacatgctgcagggtcgggatctggatctcggcttctctcgcttcaccacttcgcagctctacaccggactactcatcatcggtgtccctatcggcatctgggcctcccccttcacaacggccctgtggttgattggcgcgaccggcgtgaccgttttcggccacgccgcatttttggataagcccatcgagaatgctttttccgaggaggcggtctaggtggtcggccgcgagctccttttgatatgccctcatggggaagaccaccgggggcacgaacggggagaaatactaggggacgcgcggcgtgggaggagactcggctggaggaggtggatagtgaggaggatgcatacgggcgggagttggtgcggagcggtcgctacagggagtatggaggacgagggctgcggaggcgacctgtggattacgaggatctgacggatgaatctgaagttgatgggggagaattcgatctatacgaccatgaagatagcacggtggcctatgcgattcagttggccatgcgggacaaggaagatcaattggtggacacagcgctcgagcgaattcgtcgcgcccaagttctggggaagaaaaatgtgcggctgtcgaaacccgagctggatgccctggagcgcaagcgccagcaagcggacggtttaagcggaagccgacgcccatccaccagttctgtcaaagtgacgtcgcgcccatcgtcccgacggagtgcagttgttgcgccagaccagatgtccggcgcgtatcccacctttgctgatgcacacagtatctgggctcgtgggacgggcgcgaatagccgaccgtccagctcatcttccgctccccgtcccgggactccaacgactcaatctcttcgtccacagcagtccagttcacctcttcgaccgacctacccgccatacacccccgagcgatttgcccctagtggccgaccacagtcgatgcaacaaccgcctgtgttccaacggccactgccagacgatcctcaatgggccccgccttactacaatacaatgcagatgagctcatacggcgaacctgcggcatacccaccgcaggctgccaccgccggacagcgaatgagttacccttccggctctgcatacccatcttatcaatctcaatccccgggcaaacgctcactgcaaggcacaccacaggctcggaccgacccagctccagcaccagctccagctccatccaaattggggtcagaggagtccagtgaagaatcggagagcagctcagaggatgaagtgcagatcgtcaaggtggccaaggtggcggagcgcaaggccccgcctgctgcagttgcgcagaggcggccagttactggaaccactcgtaagcggaccagtcgatgaagtggctcagcgttgtcctgatatcctctaaatttcactttctgtctgggtttttttttctttagtgtttgttttttctcgattccatcattgcggtctttccgtaccgcgacggcgttttaaatagaccggtaggctacaatattatttcctggctcatttgatgtccacgtacgtatcttgtagggtttaacatgactagaccgatgcagcatttctgaaatgtctcaacatgctattctcggagtagccccaaaggctctagtacctggtattgccaagtattcagccacccgggctacccgtagatcgtgtgccaaccttggatcattcatatcactcccaaaggtcttcaaaggtacgatgtaaactcttatataactagggcaagtacaatataaccattgcagtaaatcttggggcagatctttcgaaatgaggctgtgggggcgcacaaatttcataccttggcagcccacgatatgacgtcgccttcacaatctccaggttttaggggagcctaaagaaaaataaataacagcttgaaccatttctgtctttcgcaactgcttctcctttcaggatatctaggaatccactataccacaagaaatagacattccccttgcgcatcatcgttgacccggttccaattcgatatccctttgtcatctaagcgccactgtcgccccttaagacatcatttgaaacctggaatgctgtattcctatgctacattgtacataaatacagggatatagggtgagtcgcacgatcggggaacatacttggaatccataccttctttccatcctacagggaaccactgacaccgattggagaagctgcgactgacaggatactataggctctcgttcgcctcgtcactctttcaatcctcaaacccccactctctttgaattggtcatttagcgggcatacaaagatcttacacaccttcattgttgcatcaaactcagtctcgaagaacaaatcaccactcgaaagtcgacagtcgaaagtcgcaaacatgtggattatatcattttggatgtttccattggtgtcagcctgcatgtgggttggtaaggcatccctgcatggaaatggaacaggatatcttgttctgggctgcagctaacacggtcctagcaatgttgatcgccatgctggtcacctgggtcagagacggcagaccgcactatgccagtatggaagcgggacagactattgcgtatgtttcctctccgctattagcccatgcatgcgctaataggttttcctacaggtacatttcagatgttggagcacaaggcttgaaaccgctgttcatcgcaggcagcgtggttaccgtcgtgtttctcgatttggcattcctctccgagcggtggcttcgacactccaaccagttggcctcgaacaagggcaggttggacaaggcatgcgctattgcatcaatctttttcgcgatcgccggtgctgctggtctgatcctgctctctatctttgataccctccgccacccgaaacagcacgacggtttcatcgccctgttcatgtgagtcttgtgtactcgactatgtatagtcaattgtgaactaatcaatgaatttctctccagtgctggatacgtgattagtgccatcttggtttgcatcgagtaccttcgcattggaatcttctaccgtcgcgagcaccgtattctgctagtcagtttctttatcaagcttgtcttcgtcatcttcgagctctccctcgccatcgccttcggtgtctgcatcggcagcaaaaagtcgtccaagcaaaaccccggcgcggttatcgagtggaccattgctttcgtcttcactggctacgttatctccttcgttgtcgatctattgccttcagtgcgcacacgcaaccacgtgcctcagggtgagaagtacctgatgaaccagggcggattcggcggaacccgcgaagaggctgtctctatcgaagaacccctgactcatgactcgatgggcccaagcaccggcttttaccgcggtcagcgggtctaactaattctctttgcttcttatattcctgtatttacttatacgacctgcacgatgtcatctgatactctgctcttgttaatgtttgtttgatacctgtcatggatactctttatatatggtgttttcaggttgggcgccgttgtccttagaatacatatttagtctttagcaattcaataactcaattttagatgcttcctatacttctagatacgaaacgaaaatatccaatcctccaccatttatcattcgcttccaaatgcccatacatataacaagaaatgctagacccatcccaatgccaggtcattatcgtatctacatatcccatatgaaatacagaaatccatatccatccatatacccaaactccaaaccccaaaaaacccaaaagagagaaaaaaaaactcaaaccaaaaacttcgccctaattctctcctgcatctcaaacccaaccccaacactctccaagtaccctttaacacccccatacctagtctcaaggtactcagtcgtatcacgcacaaagccaggcggacaacgcgtatagtcctccccaagccccagcgccctaatctcctccatcctttcctcaaactccgacacaagctccatctccgagcgactgtagtcttcaacaatcgcctccaccggcaccacattcccaacaagcagcaacacaagcaacacaaccaggcccgtccggtcctttccctgcgtgcagtgcacgatcgttgggtaggtctcctcgcaagccaggagctggaacacggcgcggatctcgctcatgctggaatcaagcgtgtcttgggctagaccggttagtccgcgcggttgcattactgtcccgcatactagacggactgcttcgctgcggtagcctgttgttatcaggccgattgttttgcttttttgggtattagttgtttgtttgtatataggatataggtaatgcaatgtatgtaaagctgcaggtgaagaatggagaagggggagggggaaattcttacagatatgttggccagtctagtttcgatattaaggcgcgttcgaagcctttgccggttaggcttattagagctcgttttgagccggggatttcgagcaggtgctcggctgggtttgaggggagtgagcctgtcggtgatggtgatttctgtgatggatttgctttggcattttcgcttcgccgtttccgcgtgcccattcggtgttcggttctgtgttggggattagtttctgtttctcgcgtgcttgattctgctgttttctgtttcgacatactgggaacggagatcgatgacggtgtgaatgtgtagttcttctgctagacggcgtttatctcgttctgaggcatcgtcgagctgcaaattgcaagttagttttttttttttttttccttccttctcgtgtttattctgacaacgcatcgatcgtatgagcggggttagaattaccctcgcactgcggaaaaacacgccttctttcaagatcctacgtgaaatcgttagcagctgtgtctagagagacttgaatatatgtatctcgggactccagacgcgtctgaactcactctttgttacagaattgattaaccgaccggccgacatcgcggaaattgatgatgttgtcgaaaggccgatccggcgagtctagatccacgctgttatggcgcgacatggtgaattagggattagggaatataaaggaaatatagacaggaatcttgttagaaatgagaaggaggagcgtgtttaaacgtgtggagaagtacaaatggcggtggacgcggacgtcgacgttgggcagacatcgcgtttttggccgatagtcgcctggacaatgaacgtttttggcttttaggagttatattcattcaattgtcattggttatgaggatttattggtgactttggtgactttgtatgtgtgggtggtttgaaggggtgactgtacgagtgttatattccaaggtccttttgtatatttttaaaacctcaatgttgacagtctagcggtctgttacttgatcttctaatcctcaaagcaaacaaaaaacaaggaagtagcaatatacagtgctgaaacaggtaccggagctaaacaaagaacttagatctaggccccgggaaaatccagaacaaggaaggatctcgattcaatgtgtcatacaacaccacagtcaacacctttatcaactacacatattgctcccggttgttcttccattgtggctgcaggtatgaccaatcgtgattgaagttgaatcctgtacgataagccccatatgcaaccagatccacctgactcagtctcgcccctcggtccgtcagcgcccacagactcatcgccaacgtgttctccccacggttattgatcacgccaggtggaaaagggaacctagtctggggaccgatgtgtggcaggtaatgaccgaactggtacccattcatgaagatctggactactgcggggaaatcagcagatgcatcgagctgcagaccaatcggaacgtccaggtcggagtccaggtcgagctggaacgtcgtcgtgtagaaccggcctgctgcaccagatatgccgtccagcggactgtgcgaggttgcggtcttgggcgctttgtatcctgggagatgccaaccgagacgctctccatagagacccccttcgttcatgggtccccggacgggatcgatgttggcttcgcctcctgcattgccttggatgcgccaggaagtgaattcgccaccaagaagcgtcgcgcctagtataccacgcgggttttgtgctccgtttggcgacacgttcgcctcgtcgtggcctgtgtaatccatgataacggtcagaacattgtctgtcttgcgcaaggtagcgctgttgaatagtagctcggctgatgtcgcggctagggtcggatcaccaatggctccgccaacatagactccgtttagccaggcggcccaaccagcggctgcgccgttctggacagtgagatttgcgcctgtcgcggtcacgccatcgaaccgtccgcgatatattttcgttccggcatggtagccgtagtcgccagagtaaagcacgggaagtgtgagtggtgccacagagttgactgatctcgttttgttgcagatggtccagcgagaatcatcgtagtctgccttaatctccggaagggtatcttgcgctttccatgatttcagagtcggcagcgatactttggcttgggctcccggggctgatccgattaagctgccgtatggtgtcttcttggttgagatctctttgccattccacttgattttggtcacctttgagttgcccgtgtagaccctaacagcatatattagcgagtaaattatttgagagcttcgcgcttactcaatagatgttgtgtttgcgttgtcaccaacaagactgacagtatccccactgacagtcgctgtgcgaacgagatatggcccaagggcaatgatctgctcactgggaaccacaatcggattggaagtagtcggtactgcaaagaagttccacgctgtctccttatcaagaaggtagaccagtacgccgtgcgagaatttcagcactgtcgtgccatccccttgagtgtatgtgtatttcgtgccatgattcgatgcaccagagttgactttcgaattcccgtaagtttggaaagtcagatgggtcggtgcgtctttgaatacaaactctcctttttgtccgatattcagatagaagacaataacatctatgtcgagggtggcgtaggtcaagacctcggcggatgaatagagcaagctcgagccctggccaatccggtagtcagtgacgataattttgctctgacggccggccaactcaatattagggattgtcagggcccctgtcgtgtagaattcaagttagcgcaattattcctctcaaacactggagtacgtaccagccgatgtattgacattaagtgaagtagtggtcacagcacgagatgagctggtagagtgcgcgagaacatagaaaccggcttgggtttctgggtttcgcaaggcccacgtatatatacccgcatcactggtgtaccctgttccattcccttccatttgcatttgtaaaagaccagatgacacgcgcgtaaacagaccgatcaacttggtctgcttgagtttgtcccgaatctcacgcgtctctcgcatgggcgcagagtagtcatatgaagtatagacaaccggagcagcactgtggccccaagaagttgcccccatcaccatatatatattctgcaatgtgactctggagccgatattattcttatagtagacatcggcgaattcaggcgaaagctcggtagaacattgatcgtagaacgtccctccccagggggagaaccaaccgccctcaaactccggcagatactcgggctgagaactcgagtaattctggaaccattggtaataagtgcggacgagattgaacccagtatctggattggtacaggacagaccaccaggataggagtccaaaccatagacattgacggcaccacccacatcctggtagtccgtcgaccagctcatagagcgcattcccttctcattatgcgtgctcgggacaacgataccagcctcattgaaggcggctttaacttgttccatgtacttgacaacagtgttattggcactgtgtgttgtctcctgcaactcattctcgtgctgattgagaatgaccggaccaccgcttgtgatttggtttgcggcgatgatctttccgatcttctggatccacggataccatcggtcatagtaggtgcttgcgctcgtgcgcgtgctgcccatttgcccattggatgcccacagtgcgaaaccaccagcagaggtctcagcattgcagtaaggtcccgcgcgcgcaatcacatacagacctgcctgcttggcataatcaaagacgcgctggacgtcgtgggcaccgttctcgaagtcgaaagtatcttcggaagcggagtggaaattccagaagaagtagactagtctcaatgagtaccagtgcagcctgggtgttgtcaagccactcactagaaatcgcattgaatccatttgcgcgtagcttctgaaatacgtcgagccaaagctccggcacggggagtcgctggtagtggaattcaccagagaacacatataccctctctcctttaactgagaggctgtattgatcccatgtcacatcagtagtcttgccattatctgtcgcagagacgaaatggctggatatgagtccaaggagtatagggagaatcgtgagaagacgcattattgggggctgcacaggtactctccatcttggaatatgacttgttataatgtgtgtatgcttcggtcctcgctacagaaataccccgtactctgctgggattggtggatgttttgttttggagatcgaatgtcggattaggcaattttccatgaagatgcgggggaatgatcggcttttgactagggacaggtggttctgaatgaattttggacattgaatacagatatacaaatatgcgtctgtacttgatttcctctgccacttcttggctttccctttccgtcttagtgctcagtccttgccgctttttgctcactgaggacaactgagcacgtcgctgagtattacctaagctcacggacttgctcaataaaatgcaccacgctagcatccaaatgcagttattcaccagaactcaagcccactcttgaccgttgttccctcaacgaaaagatgctatgccactattcaactcgccaagtctcgtattccacaataccgtctctacatagttgcgggaaatatccaaccctcagggactgaacgcacttttgggcggttatgttacgatcaaggcttggtagttcttttcttatgtcgttggctcgttggctccttccttctctatagggatcgttccttcctaagctgtaggagagtatactagattttgcctggcaaggagaagggtacaaaactcacaatggccctgattcctttcctttcccccccatgttcgatgttctagttagaatgtactctttttcataaagcatcggcgcgtaatattatatattacacatgcggtttagaccgacactttaggatagaggatatttgagcttatgagatgatattatcggctgtagttggaccccagaagagatatcgattgagttgactcctatggcccctgacactactgtttactcatagctgagacagatctcagctgaccgagagcttccccattgaatgcctcacttgtcaccgtccagtgccgagaaatcagtctcttggcaatattcacggaacgaggtcattttcagaccaagctatagaaaggtcagtcatgtcccagagtggcaacgagatcgaataggataacataccttctctggtcgtacaacagcaggatcgataccttcgtacccgaactcatgtgcaaataatacattgtgagcaaattcgtgaccaagacctccgggaagcaactcgcagaatttatcgtaggaaagctcgtcatagccaccatacttgaaaccttgggtttcgcaaaagatgcggaggtaatctgaccacgatacatattcaccaacagcaaataaattgacattgggctcggactctgcaactgccctgacgcaagggccgaaatccttgcggacatgcccgaacggaatgcccttgtcacctgggccaattcctgtcattcgccaggtgccatcaactacctatgcaacgagtcaataccttcaaaatacgcccgggaattacgaaaaaaaaacaaaagtcctggcggggcgatttcatgattcataccttcttcggggttgtaggaagtccccactcccaagggagctggaaatatatgggcgcctgaacctgcgagaattttccagccagggccgggatgctctgtgcgtagatggcagcgtctgctttagaatccatgtgataaagttcggtgaacttgctgttactggaattcttcgcatgggccattgagctgaagatgtatcgggataggccaggaacagtggccgcagcatcggcaatattcttgccctgttggagctcgacatcgtggcaatattccacaagtgattggccgggcttcttcttctggtgactttctggatctttgaagattgtccagaagtcggtgacaccaaaaataatgtcggctcccacaaaggcctcgctcaaggatgccacatcatcaaggtcacctttgatcatttcaacacctttcatctcccatttctttgcagtatcagatgccggattgcgcgtcacaccgcgaatcttccagcccggattcacaaggtaagcgtcggcgacggagcttcccttcagctttggtgttagtaacctcaggcaatatccaaagaaattgtacagggagcgattctaacttacttgcacacccgtaataccgaggatcacaataagtcgcgacattgtggaagatgttcggtaataataagataatgaccactcaaccgaaaaagtgattgagtgtcttgggctccaataatcgaatcttcgatatcctctcaaccctggaacctggcaagacctcagaatttatatcttggacttccaaaaaaaggcatcatgagacatgaccaagctgtacttcctgattgataatctgcatttccgttgccggtcgcttggtaatataggaatgacgcaagcaattatcccaggaatctcgtgaatgtcgatactgcagggcagaatcatctggtttgcgatcagagaagccagagagacccacttaattgaatttgaatttgactttcgccgttgaacttaaagtcgcgctaggctgtggggtaacagggaccgacatccctatccggttaggctggactgctcactgctttcccaatcgggaacatagtcatatattgcttgtatccctatcaacgagtgccacagcgttctctttgtctagtcagatgtaagagtctggcccattccacggatttgggcaatatcggacttcggggcctgaattaataatatcgaattcgatgagtgctgtatgtctgcatcctacttaaagcaaagctattcgctacatcaccgtaacatctttcctcacgcttccacatttcactgacattgatttcattttacatcttccctccaaagctctgacttgcgacatggccctcaacaaggaactgtcctcaacctataaccagtttcttgaaactgcgccgaaggaagtgtcttccatcatcacggacgcggtcagagactttaaaaacagttacgatcctgctagagcgatccagccgggggacgcctttccacaatttcacctgagcgatgcgaccggtaacgaagtgtcgttgaatgatctccttgttgaaggacccatcctgatatctttttatcggggtgaatggtgtcccttctgcaacctcgagctgcgtgcgcttcagagccatatggacgagtttcaccagaaaggcgtgacattggtagctgtgtctccggagctacctgatcaatctctgaccacatctgagaaactgttgttgaagtttccagtgctttcggatgttggtaatcagctggcgaagaaacttggcctgttgttccctcagcccgagtctatgcggaccgttttcgacaaatttggcgtggattggaaccagcggtacggcaatgacaacctggagcttccggttccggcaactttcctggttgataagaagggaattgtgcgcaattcctttgtgaatcctcagtatcgtcaccgattggagcccgagattgctattgagtggattgaccggctttgatgttggcttttgctgcgcgctatcttcacactcgctttgaggtctgctgcggctggaatatacgcgcgggggagggggctggttgattgggtttcatatcgttagtttggcttcgaaggatctcgacaccaaatcccaagtaactcggcgagtgttgagtcatgacgcttttctccatcccgaagaaacctgtgccgtggctcgtggtcgatcttttctagtctcgcttcctctactctagaataaacacattcgttgacttgcacttttagtatgctgctcctgtaactctgcttgaaccataaatctccgtgctaaatgtgcttttgacgtattatttaatccggtgctctatattttgaattcttggcatctcgtatcagtgaatacgaaactagtgatgagcaggtcaccaattctgctgagatcgcgcatggattacaaagcagcccacagtactttgctgattaatgccctggtcgtcgtggaacatcaggtgagccacacgacgttgagaagacattaggacaacctaattgatcctaacactgaagaaaacaatggatagtgtagactggaagtctaggggtgctgagccaccgacacgggatgcgcagatcctccctgcccgtccctcacacggatcacgaatgttggcaaggaagcttacgagtgtccaaccgtcggcaactcaagacctcaggttcataaacctatctcacccagatgacttacaccgacaaaaagaggtaagaacggagatccgtcgccatgtcatgaaggatataggccaacgacggagacgcccacaacccaatgcaacctcttcgcaagccacccgaacattttcttcggagtcaaatggttacaaaatctctcagcttcgtggcgcaatcataaacagcgtttcacccagccaaaacttagctatgctcgctcacttccctgtggaggctgatatgcgcgctctcgaactgatgcactctggtaagagttccaagctttccgttggcctctagctcctctcatctgttaatgcttgctctatattagtcgtcacgggcccttatcagccattcaggggtgtttggattgaggtagccctatgtgaccccggggcattccatgtgactctcggcaatgctgctgattttctcaataagattaatggcaatcaaagtgtgaaaagtccggaggctttgagtcactttgaaatttcaacaaggaaactaagacagcgtcttaataacttcacggagagtattagtgaaggggctattgccaatatattggcccatgtctgtctcactgtatgtgctatattcctgaatatgagctcttgaataacctcttttccatagatgaggcactgtgattgggatagctggagtattcacatggatggtttgagtctcatagcgaaactacgtggcgggtttgccgacctcggacatcgcatgtcacttctcatactgctgtgagtactccgtacctctttcattttctagacaaaacttctgactgttccttgcaaaggtacgatctagctggtgccatggtctttgattcctatccgcgattcgatctcccagcagagtttgttggcatatccaatatatcttcgagagggcttgcccctaggctacaagctttacttgtccaacccatatcgcccgcatttttcccagcgggccaagcattaacaatggtttcctcaattgcggatgtgataaataccactagtcactccgcatcattctggaaaagggatatcgatgcaatccgcctgatcggtccctgtattcactttttgctctcaatgccgagatttcccagcaatttcgaggccatggctgatcccgaagaccttatcgcgagagaattggttcgacttacatgtcttatgcttatgtcgaaattgaagggacaattcgcattccccccgagtgagctagtttcactacctgctaggcttgccgaattcgtgcctccgaatgtaaagaggctcggaaaaaagtactttgagctgaaaatttgggcccttgtcaccattgctttattgcgatattgtgacggaagagaggtatacatacaggagatgaaaagagaaatgtctgcaatggaaaaagcgacaccctacgaaattactgggattgccagagatatcgtctggatcgacatcttgatgtcaccattttcagaagagctcgcagcggatatgaaactacacgtcactcctcgaggaacctgttgaggtcattgacgctaaatctaataagaaatatcaacccacgggtttcagcagaatgaaaatgtaaatttgcgtgcatagctctatctgaaaccaagacaagtcgtggatgtcacaactattgcgggatggagtagctgtgtcagtttctcaggatatcagagtaattgaaaatagggagtacaccccaagacgatcattgtgagatctcatttgtattggttatttggatctgtatttacataggctggcgggatgaaggaaatgggctgatttccgcactcttttcagatcagcatctgttttccatttcggcaatgttgttacgtgagaaaccaggcatctaccggcacttgattaatgaaaccttgaacgacggtgatatttcatgcacagaacttggaaaactaatcaccaggccccaacctcttccattcataaccttctcgcataccggtttacttctcaaatatggctaaaccttgtgaccgctgaccagcgcccaacttgtccagctcaaaatgctggatctgccggccgtcgaaagagtcaacaacggtgattgcagcgactttggtgccatttcctggggaaagtgcgtatacataatggccgatggctctgacatcggtgagaccgtggtcgccatttctcaggtctaggatcgttaagatcttcgagccatcattgcggacttcaactagtctgttagatgctgcgtcggttaaaaatacactctctcgcaacggagagtaggtagcccaacacgtggctttctggccttcgatggtgatcttgtgcttgagagagacttcatcggtgacgtcatctaggataagaacagtggctccgaaagatgcgttcgtgatgaataggtcagatgtgccggggatttcaacgccaccaaatagcactgccgtactgggcggagagcttcgaatatcatgactctcgaagaccgacgaacacgaatctttgaatggcaggacagatacaaagcctgctttgccagcagatgggtcccccttcaccgtggtgattagacgtgtatcgtttgcggcaaagaatacccgtgcgactgtatttgttggcccaactggaggtgtggtttggtggagttcgatatcaattacttgatccatctgctgcaggccctctggtgtgaattcagcgcaggaaacgccggatttggccccagtgtatcccacgcaaggagcaccactcccaggtgaattggaatagaaaaatgcatcctggtataacaagcagaccactagcagtgaagaggggaaagaaagatgaagttgagctgagatgttttcttgagaattaccactgctcccaaggcctttaagtatcattttcttgaaatatcaataactaaacccgcgtgaaaagatgttatgaatctaccgattcaggaaaccatgtttaagtcaacaatgctacgctagcggttccacacgccgtcgttttgtatttcaaatcattcgagatagtctggaaaagtaagaatgtttgaatcgtcactctatgcccgcccgtgtgtgggagtctcgtacggagtaatcgaaacattttagagatcagtagttcgatatagacttcggcttagccccgaatagacgaaagtgattcagtcaacaatccgcttacatttatgggtctcacggaaaagccgatcttccgctgataatcttgaagtccaagtttggagcttcattgtaatttctaatccaaggtcatctatctcctctgcaccgatctgacggacttgacgtgataccaagctccacagacccaacatgaaaaaagcatttactttccttcctggatagagctgttgttgaaatccggtgccaatgtgaatgcaagaacagtcagacatagcacgtctctgcatttggcagtcgaccaagacgcagcgaacgaagtgactggattactttttgggtacagggtagattggaacagttcaaatgaaaaggacggacttgatacaccgttgaaaacaatggtaagtcgccttggtgacatgtcgaccggtttgtatatttcagagacatcgttaattagatcgattatataccaagcatccaaaaatcattagcaaagtaaaacaatccgaccctaatatcctccagaagcaccgatttcaaattccacaacaccaataatcatcccaagatccaaaaataataaaatcgtacatcaagtcaaacgtttcaaatagaaatacacatcaacattcaatatgaatatcacagattctcggagaatctcgattctcttctcccgttcagtgtgtcgccaatactaggtggcacaggaagactctgcccgatagtactatcctgcagactctggagatcaccgttcccgacacccttagacgcagattgaactcccgaatcacgacgggagtcaccctcgttcgacccatcggggctaccggagacggccttgcgtaatgtcctgctcagacggttcctcttcctgccattgcgattttgcttggtaaactttggcaaaggatcagcactatggatcttggccacgtcaatgtcgttgctgtagtagctcgaagatctgttgtgcgtcgggacaggttcaatcacaccaggaggatgtgaggcaagcgctacgctgcggggctcgtcgcggccggtcagagtggcgccgccttgaaaggcaggttcgctgtccgtgttaatgtccggacctggctgatgagggtagatggggactgggccactggagcggcgaacgagacggtcgcggaaccagttcttgagcttcgtgtcggcgcgcgggcttgtaactggtggcgtgaagtagtgcaccatcgttgggcctgaggcggctgcatctcgctgctcaatctgggcgggctcggtctggcttcgtaacggccgccgcgggattgctgcgggcacgtcactctcgtcggtctttgaaggttcagtctctgagaccgaggagtcagctgcaagaacagttgtaggaccggctatttcagtctcaacagaagcttcgtcagggatgacgctcgaaacattgtcgtctgtcgcaacattgtcctgtgtctcaacattgcgttctgttgcaacattgcgttctgtctcagtattgccttctgtctcagtattgccttctgtcccagtattgccttctgtcccaacattgccccctgtctcagtagaagcgtgctcgggagtgatgtctgtcgcaacattgtcgtccactgctgtagccggagccggctctactacagcttcctgggtaacaggcgagacagcttcggcctcttcggtttcggatttctcaacccgagctcgtttgcccttcttcctccataagaagaatttgggaatcttgctctcgaatttttcgtgcttgcttgcacctgatttattggtcagaacatatcaagaaaaaatgacagggtaactgacctttttcttgcttctccaactctttcacctcagcttcgcgttgacgctccaaatcagcacgtcgctgctcctcctcagcgtccaaacgggcttcgatatcatgggctctccgtaattcggcattctcggtaatctcatcgaaagcgggctgaaggcgagcccgagctacagcatcgacgtcggccatgtccatatacctttggccgccgatgttcactcgattgtcttgggtggtagcggcttcaaaatcctctgcctcctgtcgtgcgcgctcctgggcaacttcatcccaacccctctggacggaaggcggagcgcgaccggtgtccgcataaacctgcgcctccatgtcctggagggtttgctccacgttgcggcgagcagcctgcataagcaactcacgatccttgttcttctgcacatctacttggcccagcttggtccgcaggctagtcatctggttccggatttgccgcgactgctctacatcgagctgagaggcatccacatcgctagaagttctcttgcggcgggtggtcaagcgcgaccgttgcggttgcggtgcggtgccataatattgttggtattctgcatgctcatcctgcataagagcaagtttctcggaagctcgcttttgcgctgcttcttgtagtgcgatcgcccgccggatagcatctccatctgcggtggatacggtcttgcggtagcccaactgactttgtcctctttgggctgctaggatggcagcggatctgccgggttgtttcttggtactggtgactctgtacatgtcccttgccattgagatggcagcagcgcgttgcgagttcttgtagttttgttccacaatgtcgctttgtattggtggcgatgaagtatatagcttcgggttagtgctagcggcatgctgtatcctgcttgcttctatggcatggtctaagtggttaagggggggctccacttccacacgagcattttgcgacgcgctagcagctgaacggctgtatggtatttctgaggcaacccctggatcactgggtgccgagtcggctctcttacgcgagagcgtgtaagcgcccgacgcagcctggagcgccttgtccttcgggttaccaccgacggctgtgtagtggaaacgatcggtcgctgagctgccacgcctatgggaagtggacgtaggggcctggctcacggaagccctttgttcacgaacagcgagcattgcagctcccagtccctctgcactgtgctgagaggtgggttggggttgctggggcggaacatagtccttcacgcataatgcggctttctcggcggcaggctgtcttgctggtggccgccatacttcgacaggtttgcgattcgcatgtgcgagagcggaagcagcggaggcgtggctgaggtttggagtaccaccgaccgcgcgtgggtctaccgcaaataacattgtcagcttgtgtgtatttcacttatcgagggaccatactcactgaagttctgggtattaatcggggtcggggcgcgaagagatgccctacgttcagggtgtgtcacatataaggcagcagtcgcggctaatctcacgtgaggttagcgatccgacggatatcctgggatgcacgatcatcttaccatcatctgccagccgggactggcgagtcacttgcacagttgccataattcaggaactgcaaattccaatataaccaaagtcatgaaaaagaaaaagaggacagcagagaacaaaactataaggcgaggtggatatggaatggaagtccggaaagcttctttgatccccgtgacgtcgattgggaagccattgcatcatcgctttggagattttgggatttttttatggagacgatcgatctgtcccggagctacgctactccaagctccataggggctagtgaaagatctaagtggagtgaagattccgcattcgaacaagcggaggcccgtttttcggtggtgacgcgaggactcggagttctgatttacttctgaatgaaccctgatctacgtcgatctacgtcgatccttcatatttcattcggatactacatgtacctatgtacctatatgtaggtacgaagtacggtgatgtacatcgaagttagtcgtgagcaccttaataataaggcagggatcgccaaggatttcattatgaccgatgaacgagaatcaaaaggtcataaagtccccataaataatatccatgtagtattccgacgtattgtacgagtccaacatatcatgacccaaagtgtcatgcttccaatgttgcttccaatcaccgtcatctcgctcttatttggacacaagaacttcccatttgtctgcacattacaccacaccagccgtgtatcatttagctagtcgcgagtcgacatatatagacgcatccacaacagaaatcgaaaagcccgcaactgtgcgaatttatacaggcttgcgcacacttgcagaattctaactactaatttcatacccaactcgatggatcatctctcttatcgcaaaggtgttgtataaaattgcaggaatagtttcttcgggtactggaaatagattgatggacatttgcagaaatggttcactcagatactcgacataacttgatagttaacagttgatcagagaagaacaggtccctcgcctcgactggtgggtttcaatatcatgccgaggtcatcccttcctgtctcttgaatgagctcctccgccaagtctagtctccgcgtgtaaggggtcggctttccaaccaccttaagcatacgcccatacattcggaaaccctttgataatcccgtacataattccaatagccccgccgatacaagcatcagacaaaggagacacaggctacccattatggatgaatttcccgagatgacagcggacaaatataccatgagtgtcgagaaggtgatgagtagctcgtcaagcaaagttttgtctcggagccattgcccggaagtaacagccttcaagtcatcgactgtgccccgaagacgaatccatcgatcttgtgtgagtaaaatgagaagatcaccgttcaccccgggctctgtctcgcctttccagtcaatgtgactccgtatcttgatagaccaggtgttgcagattctagcagtcatccacatggcaagtgtcaccagggcccaccaatcttccaacaatgcaaggatgataatcacagcgactgtcaagatctgaccaattgcatagaggaagagtagagtcttaccagggctttcgatcaagcatctcaacttctcctttatggtagtcggcggcaagtccacgactaggttgagtagattacccgtttttccgacactttgcaaaaagtgcaccgtggcttcattctcaatccgaaagacgtatcctgacgtcaaagctcctgttgggggtaattctccgccactaagactaggggctgaggaatgtttgtgcatgccgggtgccagaaaaggatatccgcgagggatgaagtaccagtgatagcagtccatttggcgatactctgaagatccgccagagctactagaccagcggcgtcaagctggaatttgccagaaaggtcggatagggcttgttggaagttcattttgttaggatctgtggccgaagaaggaaaggtgggctgagaatgagagataaattcaaaaggtcgtagacaatcctatttatatgaagcgaactgagagtgactccgatgtcttcatatacacaaataggccgaattcccatactgaaagcagtttcctgtctacgccagcctcaccgtggttcgtccaataggaaggtgttctcaccctccaactttcgtgattgctatttttgctgcgatgtttcttttgtttcccaaaggccattctctttatgctgtttcgtgtatgttttgtcgcttatggactcacctaggacgcataagcggggctaatggtcaggaaaaatgctatactgtaccgtacctttagtattcattatatctttgatgccaattactagcccatgcagcggccctctctggtcttggggaatccaatctagctcacgagcttgactgagtacaaatgcgggatctgatgcaaactcagtagatattcttcgtttggatcacagacatgagcggggaaaagtttacctagaaatgcccatgctttgacaatgcagtcccgttcctcaatgcgtgctaagagagaatgggcgtattcctcgacagtgatcgtgttcttctggagtatatcccgcacttgagtggcggtcaagagatacggcttttccaccatggtcgatgatagttgggttccggacggtgagggccaatggcggttaaaatactggactcactcgagatagagaagtcgcacgactagataatgtgcatagcaaagaagacctcaagaagaaccgcatggtggggtaggtatctaaggaaaacatggattcttgaagtggatgtttcagcacgactttgtttagtctggagatattttgagaggcaccattgattggcgatagcatgctccagattcgaatatctaagttgcgatataagccacaatcgagttagagtcatcaaagacggaggacaacctcggaaagatcgtgtgtgacaaaggaagtgggggaaaacgagcgatgtcgtaccggtagctaatcaaaatacgacgtgaagccgagtcttggaaatgacggtggtggaagaaaggaaggggggaaatgggggcaaagaagaaagaaaagcgaaaatagaagtccagccacggaagaattctgtccctggctatgcatggtctttcttcgatgcaatattgctgccaatatgtaacatggaatgaccagatccatcgaagactttgatttcgatgttatttgtttggctggccaactcagcattgtcaccaatctgacccacgaaatcatccttcacttagacctctccgacatggatggtgcgtcgctggagttccatgcggagaatacgcttcagaacatcatcttcgccgtctataacctccctcaagagttgtaggctgccggaactcatagcctggatctccttcctacgcagctgtccctgttcattggctgtggaggggaaacaactccaccaagttattgaccaaatcggaaatgttctcgactaaattctcatagtttcctcgcttgtaaagagcccaagcaactcggtctctcttccgtggcttcaaacgcccatggataatatctggcatggtgaggtggagaccgttcagcgaatcgctcgctttcgcaagttcgatatctgtgtcgaggagcaacaatcactcatgtcatgtaaaatcatagatacccgccccttgaactgcccaaggattgcgacgttacgcattaccggagataaagcatgtcgaggatgtcatgacgggcaaagaaagaccggttccattttccaaagacatctataccgggaaacggttagtcgggtgcacaacacatcacccagtaaaacttacacatgggaatactcaacaggcagatgcccatttggatgctaccgatgacaatcatggtatgcttgatgcctccgtgggcaaaccatttgtaggcaaaaaaggtcaggacaaagctaaacatgtttttgaaaaccaacatgcaggtaaatgcctcaatggccatctcgcctagtaatgtcagcaatcatttccacgcaagacctaggagtccacatacgatgggcatcgacgatatagagtgaagcagcaacggctcccataaccatgccgacgatcaagaatgcaaagaagacgtctggcagcagccagccatagtgcatcacattattagcagtccacccgaacccatacagtccgataccacagaaaatgagctggggaatcaccaagaggatccggaactcaggctcgtatttaccgtggttgagccggatcatcagcttgttgatggaatcagaaagcagaccagacagaatgaggcctacaacagagccgataaaggcacccgtgtaaagatatccggttttgtcttcctcgaaccacattggaggtccgagaaacacaattgctagaaccacaccgacgaagaccgcccatccgatgacgacgccttggatcagacaagcctatactttaatcagcgtatgtgaaactaagcgaagtgggttacttacccagaagatgcccggatggaagaataacgggaatggacgaaggagcagcttgaaaaagctctcatctgtttttcgtccattgaacagcctgagcgattgggcgaaggaatctttctctgggactgttatcgcggcttccgtcttcgaacttccatttataccgttggaccttggtctaaactccttggtatcatcactggaagccccactgagtgaaacatgggattccatggactcgccgtgcccgccgcttcgcttgaagtcggtgttcaagtaatctgagcgtcggaaagcagtttcaggcacgaaaaagaacatcagtggtagtgaagaaccgaggaaaatcgccacaaagtagaaagaccactgccatcccatggacttggtgatcttgcctaccacaacgggtgtcagaaaggctgcaccaaagagtgcgacattggatacagccattcgctttcctcgttcctttattataccgattagtctcctcatgtgtcaaatctacaggaaaagtaggcccaactcacatgaacgaagtaaaggtctccaacacaggcatttaccaacgcctcaaacggcgccaatgcaacaccctggaatatccttgcccatatgagactattcttgttctttccgctaaccccagcccagatgcagctgacaatcatcaagacatgcccgatcaggaacagatgacgtttaccccagacccgagccgttggcacaatgagaattcccgccacgccgacaccgcataggtgatatccagtcaacagggcggctgctgtaaacgtgatttcctcgtaatctgcgatggtgactgtatttgcggctaggatagagcttagggttgtgcagaggatcgttacgaaggagaggatggcaagaatcgtatcgcgtcgccataatggccagttctaacagaaccattcgggtcaggacttttgtcgtggaaacaaattctagggtgcggtgctctctgggacataccaatgggtcgtttgggtcatcgctcggttgcggtacgaggataatcggctgattgcccgaccagtcgcatttaaggcctgaggcacccggggtctggtcgctcgcatcaccgttttgttcgtagatatcagaggtacctgaagttttgaagttgtgatgagccacgcggattcgcttgcgcctaggcgggtaaaggcatggaatcttacctgggacatgcgcgagcttcgtatcttccagtactccaagacccatgattgtaggaagccaacgaggcggggcttgtagataatgcagcggtttaatagaaattcgaacaaggtcagcagcgctacggagtaattctcgaccctccaaagaaggaagctacgtgaaaaagcttcccggggccaatggggataaatagcagatataaataaatacgagttcaacttgaggactatattataggactaaatataaggactaaccttggaaaagataagcagctcggtcgatatgtacataaggcccgagtgtgggcgtaattttgaatgtgatttgaggtaaatttcaagtctattgtacaatatacgacatgcaaagttccatctaagaccgcgtttgggccgacctttatgagtgaatatatgtacaggaccgtacctacggagtacatacgagttgcccaggtaagcctggatcggcgcttccaagcttagaccgaggcatcacattcaggctcgagcgtccaatattcggccgaggtgcaggtggatcttttacaagaatcaaacagcttggaatcagtgtttttgctgtagagaagttcgtgttgagatcagggaccgacccaccgagggggaaaaaaagccactagtgctgactgggggccttaaatttcccattcgaaccttgtgattggtatattactgaggtgtacaacccgaatggtcgtcataaagtagaaaatagagtgtggcagtgaattctgtaggaaacaaggcgatgggagaggtctatactcggaatatcgttgggaaataaatgccacaaccctaaacaaaaacctccacagctccatctaagcctccaggtaatttaacgaaataccaatacatggcagtctcaaaccacatacatttgagatgtgcatatcgattgattctacagcaatttcgcatcgtccatgtcctaagagcatagccaagcttttaaatacggactttgcctttcacaatatgcgtcgatactgaagaagagaaggacttgaggtccactgggcattcttgtcaacacgtgaccgctgatatcatgtgttaagtcatgtgatgaccagcgtcaccaacggctccagagctagactccaagttgtgaggcgcattatttccacagcagcggttacgacgtggtcgcgttccatattgaagtgacatcctcctccttgaagagctataccccgcgtcattgtcaaatcccaaacaccggcccccacctaagactactgcagcgagcgcgcgaagcacaaagcatttacgcaaaaccacaggtccaatacacctatccagcacatttttaattatgtcgtcggtctccccttcaaaggaacacgatcttgacccagaggcgcaatcgggggaagaacaagaccacatggacaaagatcaccacgacgcgcagggacaccaaggcgagtttgaggtgaaggagcaagatcggtggcttccgattgccaatgtggctcgtatcatgaagcttgcgcttcctgacaacgcgaaaatcgcaaaagaagccaaggaatgcatgcaggaatgcgtgagcgagtacatctcatttatcacaagtgaagcctcggagaaatgccagcaggagaagcgcaaaacagtcaacggcgaagacatcctattcgccatgacctcgcttggcttcgagaattacgctgaagcactcaagatctacctatccaagtaccgtgaaacccagtctgcccgcggcgacaatcagagacccccaagcgctggctatggagctggaggacctgttggtggccccgccggaggtgggcctggactagctcgtccgacgggcttccccaatcctgaaggcacaaatcctatgtcgaacctcagccttgacccgtccgagcaagacgcctctgcctacggctatccgcccattgtcggccagcctcacaacggcgcaggcggcgagtcatactagtggatgatgtgaaggggtcggctgacggacgctgcgcctagtttcaatattggctacatgtcctggagattaccgacgatgttgatttcaacggaggtctgagatgtttcagctaggggtctcggacctcagcaatgtgatgagaatggcggagtgttgagtttgcatacccgtgaacaccagcctaagataacttgaagaaatactgtaattgatgcctaactcaaacttgaagatttgtacgaacttacttaaatacccccgtaatataaataatacctttgaagatattaataaaatagtcctcattgctaggaagatccactttcggtgtaaaatatcaggagttctgatactatttaacatcatctccataccggccgaaccgcacgtgaaagagtctggagtttttgcggggaaaaaaggtaccgttcatctgcgtatcggcgtatttttgacctatctattggtttattaccacgacctggccacatggagaataaaacctctcacatttcctcccccaatcactcactttcatcagcctcaataggtatctgcaaagatgaaattcaccatcacttttgccctggcagctctattgagcactgccgctgctcaaggcctgggcgatctgcccgactgctcggtatgtgtttacagtcagacatacaactatgccaaatgtgccacctgctaaagaagccattgcatagaaaacctgtgctacgggttcaattccccagagctgcggcattgatttcaagtgcatctgcgagtccaagtccttcctggacgatgtcgcctgctgcatcgccgataaatgctccaaggctgaccaagaaagtatgttctcttccttttcctccatgcccaattgagtacgcaagtgcgggattattccaaaatgactacgcataatggatggcggaacatgtacattgggctgatatgttacacttcaccacagcaaccatcaaggtcgccaagtcaatctgtgcccgcggtggtgtgaccgacctgcccgccgaggtggtctgctcgagcagtaaatccagttccagctctggcaccagtaccagtaccagctccagctccagcttgaacgagactggaaccaagtctagcactgagacctcgagtgcgacggaaacttcggattcgactactgcgaccagtacgaacgcttctaccgcttcctcgaacagtgcctcgtccatctctgctgcggcgactagcactggtgtcgctgctcttgcccacagggattcttcgctcgtggccgctgctggtgctgcggcggcgttcgccattctgatctagcatgaggcgtgctagtgatttcaggggctggtacgtttggcgacattgaaatatcgtgatgaggatggtatgaatggaaacacgaaaatggcttgggatgcacctgtgtcttattttatccatgatataattttaattgaccggggacacggtatgtctaaatgccatcgcttttcaatggcggggggatatttcaagttaataatacactcatagaaaggattaccgaggaacctgtggaagtgctcaattctcgcgggtatcctccagcagcttggtcaggcgttcctggcgctcctcgcggagagtagcgaaagtctgtagagtagcacattagcatgaaaaacagccaacagggtcaattctgcccgattaatatattcccacttacccagaaccagaacatcatttcgaagaaagcaaaggtgaagaccaccctgttcttcaggcgatccagacctccaacagccgctgcgcttgtgtaagacgaggccaggtggtcacctctgccttgatagataaagaacgcaattccggcatacacggcaaagcgacaagcagcaacggcgacccagacgctccagtaaattgtcaaggaattagtgatatattcgggcaaacgctgtagcacctgcagatcctcggcggggaggttgccatttcgcaggggccggatataagggagagcttcatcgagagcttcgtggaaggggatgttggacagtatgacgacgtcgataagggcctcgacgaagatgaggatggcacagaaggtgaaaggggattgttgcgggctggacagggatggaaagtcctgtatcatgggtgttagcagccaaaatcaaatcgaataggaagttccaatgcccatagggtataaatggacatgtgaatcgggcttgttgatgtggacatacaatcttcaaggcctctcctatcataaacaccagatcacagtcggtgatcacctcggggctcttgatcagatagccggcgatcacaatcagaaacacggcatgtgcctggagaagaagcttggatgaaagtaaaaccatggtgggcgagtcacaatggcacaagtttgtggacaagaggaagttcccaaagtacagacagaaataaataaacgacttggagttggtccgagtgttggccgcaacacatgtggggaaaaagcagctccggtcgagatatcccccaccaacacaacaaccgcgatgattggatctgatttacgacttgatgcctgctgattattgaactgcgtggattactagtggaacatcgccctgttcctatcatactacatagtggtccaacccccatcctctacaatgaccgacccaaacccaaccttcaacacagagcgccatgtcaaatactacctccgatgcctgaagaccttcctcccgtccgcctacacttccaatgactctaatcgtatgctccttgcctacctgaccctctcgggattggatgtgctcggcgttctccaaagcaaaaccacaccggaggaaagacaagggtacatcaactggctctaccactgccaggtgccttcgggcggattccgtggcttcccaggcacggattttgggccaggaaagcgaaataaggataatgaagcctgggatccagcgaatgttcccgcgacattctttgcgctagtcaacttgctcatcctcggcgatgacctgtcgcgtgtcaagcgacgggagtgtcttgagtggcttcctaaagtccaacgcgccgatgggagttttggtgagcttgttggtcctgagggaagtgtagggggacctcgtgatttacgatactgctgttgtgctgccggtatacgatatgttctgcgcgggcggagtgagacggggcttgacggtgtaccggatatcgatgtcccaggttttgtttcttttatacaggcatgccaggtatgtggagaccttgatgttttttctgcgattgggacactgacacagtatggcgaaacagacgtacgacggcggcatggctgagtctcctttctgtgaatcccatagtttgtgtctccctttccaccacctggatcatctaacaaccgacaggtggacacacatattgcgcggtcgggtctctggacttcttgcgccggacctcaaatgatctagaatcagtgcccctactattggcaggctccaatcaattcgaggctttggttacatggctggcttcaaggcaaacagcccagctggaggaacccgatgaagacgaagattatgaacagcttgagatgacagagacgggatctatcgatgatagagtccgcaggttacccaatattgaacccctcggggccgacacaataccatgcgccgggttcaatggccggtgcaataaatatgcagacacatgctattcattctggaacggagcgacactgatggtacgtggccgcctagctagtattgagtgtctactaacgcgaatatcagatgctagaccggtatttcgtggtcgatggagatcgcaatcgtcgatacttgctcgaaaggacccaacatcttatcggtggatttggaaaggggcccggggatcctcctggtaaggcgatagtattctgatatcgagactatgttgctgaccaaacctatagaccttcttcactcatactttggcatggtgtccctggctttccagggtgaggtgggactcagcgccgtcgatcccacgatgggttccagtgaacgcacggtccgacatcttgaatcgctgccttggtggcaatcatgaagtatatacataacacgcctgtaaaatgacgatggttcattccaccaattggctcatgtcagcacacatcagccaataggtgtcgactaagttaattgggcgtcggtgtacatcgtacgttgtacatgtaccgtccacaagtaagggttgaatcttaggccgtaaggcagtgacaacacatattcttctacctacaacgcaagattatggcgatcgtgatcaatttggtgcttcactatggagggattctagccaattaagtcgcatacctctgaagcaggtaatttgcacagcgtcagcgattcctaaatagaaacggaggctacggagtaatgtatattgtatctggtataactattgcacatcaagataataatagcagactccaaggaaaaaaaaggagaaccaagtgccgagttctccacacggtccacgttcccgttgacgtcttggaatcttccaaggcctttgtatgcaatttcccttatcctttcatcatttgcggtgttactctatttctccggccatctttccgagcccccagctacccctttctaaaacttctcgacctccactccgctcataccgtttatccgcgcatctcgtgtcccgttgaatggccccggcacaactatttccagtcaaccccttgacgcgcagagactctcttgacgacatttggcaatcataacatatgccgccccgaacaagagcgggggttcaaagccagaaacaaaaggagaaggtgcgtcatcagggatgcgacatagggagctccaccgggtttcctttgttcgagccttgcgcagagtccgtggaaatatggctaactcggaattctcgacagcttgccaactcctacaatgagctccttgagtaagcgatcttgcttccggtctggatggtcagttgcgctaacgtggtgcttctctacagggagttctcctccaaggatcttcggactgtaggaaattatacattggggcggctaattgggaaaggttccttcggcaaggtttatctcgcctcgcataagctcaccaatggctccaaggtaggtcatatcatacaaagaaagttgtgggggcaaggctgatcaagttcgcaggtggtactcaaatcgtccagcaaggaggacaccaatctcgtgcgcgagatccatcaccatcgccaattcctccaccctcatatcgcgcgcctatacgaagtggtggtaactgagagcctcgtttggcttgtgctagagtattgtcctggtacgtcggcttgcgcatggcagacgcatagagaaacatactgacaaagctcggttctaggcgacgaactttacaactacctccttcgacacggccccctaccggtagagaaggtgaagcgcatatttacacagttggttggagcggtcgcctacgtccacagtaaatcctgtgtgcatcgcgacttgaaactggaaaacatattactggataaacaagaaaacgtcaagctttgcgattttgggttcacgcgtgaatatgaaggcaaggctagctatcttcagacattctgcgggacgatatgctatagcgcgcccgagatgctcaagggggagaaatacgcgggcgaaaaagtggatgtatggagcttggggatcattctatatgcgcttttggcaggcgagctgccgtttgacgacgatgacgaccaaatcaccaaaaagcggattctgtcggacgagccgaccttcaacggaaagttcacggacgatgccaaggctctggtcagtctcctattgtccaaacggcctttgattcgacccagtctggatgagatcctggcacatcctttccttgcggaacatgctcctcaacaacttgcaatcctgaaaatcccaagaccatcgccatttactacgccactggagaagactaccttgcagcggatgaaaagcgctggggtcaatattgacgaggttattgaaaatgtcttggctcagcggtgcgacccactggctggctggtgggccctgctgattgaaaaggaacaaaggaaggaaagaaagagagagcgcaagcgtcgggagcgggatgctgaagcaaaaaacattcgtcgtctgagcgctaccagcagtcgcctagaaaagcgatcatcggctttaatggaggtggaggaagaaggcatggggttgcgcgatcgtgggagacgggatagaagaagcttaccatcccagttggcagtgccagatcttcctgcgcttccagaaccgctccctgtattcccaattgaggtgaccacgccaccattgccgctcgacaaagattctatacgatcccacaactcgacgcgacggcgcccagtgcctccgccaaaagacaggcggcgatcacggcccagcatactgcatgttagcgcatcacagccggagttgacacagcatcacggcatcttccggcgtcgcactagtcgtcgtcaccagtatccgatactcagccaactagcgtctctcaaacattggtttgtagagtcggcgaaaagagcgcggtctccccatgccaaatcgacgagctcgcggaagtttctttctgaaaagttgagcccggctaagagtcaagatactgggaaaacccctgcacctttagcgtccccagcaagcgaggtcgcaggggaggatgttgttacacccacccaggcaaaacgagcctccaatgccagcagcctcgctcctagcagtgcctcataccgccaaaaccgccactcttaccctcaccagccgcgcccattgaacaccagtcataatagtcatcgaaactctctctcgccctcacctatcaccccacgcgggtcctatcggcgttcatcggccgggctccgaggtcgcaaatccacatcctcctcggtatcatcgatccgcagcattcaccacgctcgtgctcactccaaggcctcttcgatttcctccaacagtgtggatactatctcgacacccactgccagagcctccaggtcgcctcactcatctatcaaagtgctgcccaccactccaggcgcctcatcccgctttccgagcaatattcggttggtaagagggccaggcggagcacctcgagagttcggtgaccacttaggtcagatgccgtcgtcgttcaacgaagcggtaccagggccactgctctactcaccctcttcaagtctggtgtttgcaaggcgaaagagatctcttttcaagggtcctatgatccataccaccaacttgatggtgtctggtgggatagccaactcctctatgccgggtcagccaatggataccagcgggcctgacctcgcaccagggcggcctgctgcacgcaagagccaaatcatcgaggaagaggaagatgtcgaaggaattgaggaagaaattgaagaagtcgatgagttcgaagaacctactacaccaggaggtttctttacccctgatgagcagccagccgagaccgaatctccctcaagcggcagaacaccatttgatcctatcctaaaccttgataccagtccccttcggcctcctcgctcctcctctttgcgctcgccgtccgataccccagacaagatcggcatcgccgaataatactccacccgacagcttccttgcaatttcccatatgtgcattagattcgggtgttcctttgtccatcccacgatcccttattcctatgtttgttagacgatagagcttttatacccccacttacacagcgtgtttctttttcatttccctttacttgtctctttttcggcataattggatccaccgttggacctatgcctctccctctcttgcgctcttttccttcacatttcctagcttcgtgaagcgctttctcttccctacttctccttgctcctcggtgattcgactctcgcttgattttaatgtcttttgcatagaattcccctgtctcatagaactctgtcccatatcatattgctggattgatcagcaacaaaatacttgcatgatgaaattgcatagacctatccactttgataatccccgagagttcagcttaccacaaactgaccggtgggctggcccacgtgagctccattgtcatggctctagggtggatcgttcctttactggagatgcgaataactatctgataacttgagcgtgaactagtgatattctatgtcgagagccaatatgacatggtaggatagttgctaaagacaaagaatagtacaattcaatgttgatcaatcaaaggataaatacaatcgtatatttatacaataaagattactcttgctttcactcaggcctttggtgagttgtgacaagcctgtccatgggtccgactacaacggtgtttggtatcatttggaatccggcatcggagggatgtcttgaaatctcactctcatttccaaccacccggctggaagttgttgataattatctcaggacttctatcacctgaatatcgaagcagttcacacactcattcaagagtgttatcctagtatcgaccgcatgtctcatcaatggacagatcagcttccatgaggggtctaccacgatgtctgaactgtctcactctttagcgtccaggctccaataatatcatattcataagactatcatcttttatgggggtctctactttacgatatcattcctctccaaggagattatcctctatatgagggattttatatcataacggtgacgactctgacgtcggtttcctaatatcctaccatgttgcctttgtatctaacgtttatacagtggtccatcacacagttagcgacattatccaagaaccaagaataccacccggtccttggcctgtttatccaccttcaaaaggctacagcaacatcgacaccccatctgaatgagtctcctggaaaagagcatctaaagcgacgaggctgtcgatgagcgaaagatttatgcgttcgctatctcactgctaagggggagcttgccaattgcccacgctttatatatatgctagcttctcgggaacgaaacttccgaaattgttgctgtgaaaatgagaatggaagagaaagcgctcaatgcggagatcttggaggaacgcggacattcacccaggcctttggcaagctgggagttcggcttgctctgccacaaattgactagtcgcaactactgggaagactttccacttcttcaagatctcgaatgacttcaacgtacgttatactcaattcgtgatggctattatcctatctaatctatatcagtggtcgtcggtatatgttttgggatatgttttgacgtgcgttcgtgtagcatttccaggccgcttggacttctcgtccatatattctaccgtgccgctatcatatcccctgcatactcggaggagagcttatgccaatccaactagtaagagatatctggtggtagcgccgcttttaagaccgtcgacgaggatgataaaatggaggacttggttgattagcttttatatctggtatcaatttttttcttttcctttttcattttatggtacctttttccatttgagctttgaaaagattatcgatggtttacgcttacgtctatgactcttggatactcaaattagttatggtcatcgcctgttactctataaagagaataatcctaggcatggaaattcaaggaaaatactaacatccattattcattaaccattaccctagaggatataccgaaagcagagcaaatagcaaccattcaccgctctaaatgaacggcttggtgcttctcgtcatcgatatcatgagagtccataacagcctcctcgtctttgatattctgactctcaagaccaacgtcactcccgccaatcctatccacggtatcagtatacgacggaacaaagttcacagcaatagcgtaagtccaagcgacgaccataaactgcaaccagcattagccaccgatctaacagggtagatacggaaacgaaaacaagaaacccccatctaagagcagaacataccatagtcggaacaataaacgcgaatcccgtattatcatgcatatcagcaacatgacccagaataggcggcaccacagcacctccagaaacaccagcaacaataaacccagagccgcgcttgtaatggcgtccgaggccacggattcccagcgccatgatcgtcgggaagcaaacagactcaaagaagagcgtcatgaacagcatagcgagaccaacctgcttggtctgcgtgaccgacgcagcgaggaacgctaccgtgcacgttaaatacagcaggaagacccagcgcgcccgcacgaatttcataatgcccgagccgaaaaatctgccgactgcgaatgcgccctgtgccccagcgaggtacttcgctgctgtggcgctagatgtacccgtccaggtatctttgacgtagttgatgaaatagcctgcgatagcgactgaggaaagagttagcttgatggaatattaagagagaagtataagataaagggtggtaggaaacgcaccctgcgcgcctgtatacgtgaattgcgccagtgtcgcatggaaaagcttgtactgtttccagaaaggcttatcctgctcgtccacatgcgtctgcgtcacctggaaggccatgtcctcgtctgtgacttcgggaatattggagaggaagaatacgccggcgagcaagaaaacgaagaccccgatggcgaggtagacccactgcacgcgctgcagggctgctacatcgtcctctgtctcggtgaagaagacataagagcccagaacggggccgacgactgtgccgattgcattgaaggcctgggcaaagttgattctgatctcagaatagcggggcggaccgcagactaggcagattcaaatgggcagctattaatgtctatgcttaattatctgtggagcatatgaatgtcttaccggttaggtagggattagccgctgtctcaagagaccccagtcccgagccaatgactaatgtggcaccacagaagccgccgaaggattggtttaaacctgcgggccacatgcacagggctccaataccgtataggcacagaccgaagatgaagacggtcttgtagccgtagttgcggaggatccagtttgcgtagccgagggaggctaaggggtatgcgctgggttttgttagagtggtatctttttttataatacatatgttatcgagagattccatacccaaagtaggctgcttgaagaccagctgagcggccacggtcgatatgtagggttttctggaaatgtgagttgagggtgtccagcaaaccatacgcaaagccctaattgaagtcttagtgggaggactggctataaacgagataccgtagcatacccataagaagaataaggtcgtgactagggtcaagggccacagactctgtcgtagagtcagagtagcagcagaagtagtcgcacgattatcaacacgcaagcccgaacggcttttgaggaattccttgacgcccatagtcctcggtatataaaaaagacaaatacaatagagggatcgaatgaccaagcggccaaatggggtatttaaatagaaaacgaaacaaggtgacaccctgatttccccacaagtcaccctttaccccaagtccggggaaagccagacgatccctggggaaagaccagcaacgtccaattacaagtcagaacacggagtttcaccgaggatcgaaggtcactttgattttttccccgctatacacccctggagaggtggcgtcagcgttgcatggttgttttaatgctattcatatttaggctatgcaagttgttctctcccgtgtctggtggaatgccactccgagctatattgagttagtcttactttactatcctagatagtagtctagatgacatcctaaggactatcatacatcctcctattagttcatgagagctatagatgatgatcactttgatagccgtagacaaaagccgtgtctattacagaatcacatgatccatccatgtcgttccaatattggaaagggatctccaagctagacgagggcgtggaatcaagggacaaaccgggcaagatcgacacatcttcgaataagctagtttatctacgaagacacagtacatattgtcctactgtccacaaatacaacaatcacaggttgtaatctttcattcggctgatctatgggcgttcatgatagcagtcataagtaatccacgcactctcgtattcaatgcatggcaaatatctagccaatcaggcaaaatctatctctattacacaccggttagttagctcctgcgcgagcagatatctaggagggtagggtccaatttagacccatcctttatgcccgcttgggcttaccgacggtaccgctctgggcgaccgggttgacggctttcgtgttgtaaagacgacgctcggccaacttaaggacctcgtcaatcaagctggaatgtggattagtaagatattctttcaggattaaggagaaatgacacatacatcacaggtgcactgatcaccaacaccgcctgccattcattccagtccatgggcagaatcgagaacaggttctggaggaagggaatgtagaggatggcaaagtgaaggagcatggacagagtgatagcgtagataagcatggggttgttgcccaggaagaaagtcaggagggactcgctcgaggacagcgcgttcatggcgttgagcatctcaatcaccacgaggatggaaagagacacggtggaggcagatttgcccatatcgttgctgaacatttcgcagccaatctcggggaactgagaggcacacttgtggtagtgggactgaattgacctggttagcaacacgatcaatacctggaaactttagagacttaccaattgcccgaaagagatgccaggaccatcggggttgtagacaaaccaccagacgtagccaaagacggtggcagcaccaacgtagatgccgacaaccatgtagcggaacaacaaccagccgccaacaaggggctcgtcgcgacggcggggagggcgattcatcacatcgtggtccggagggttgaaggacagagcagtggcaggcagaccatcggtaacaaggttgacccacaacagttgaacgggaatcagagcctcgggcattccaagggcagcagtcaggaagatagagacgacctctccaatgttggaagaaatcaggtaacggatgaactgttgagtgttgctgtagatagaacgaccttcctcgacggcgacggtgatggtagcgaagttgtcatcagccaagaccatgtcagaggccatcttggccacatcggttccggtacccatggccacgccaatgtcagccttcttgagagcgggagcgtcattgacaccgtcaccagtcatagcgacgacgtggttcaaagactggaggagatcaacaagcctagacttgtgggtaggctcagtgcgcgagaaaagggaagcggtctgaacggcctgcacctgttcactttcactgagagcgtcgaattcacggcccgtgtagctcttgcccgtgagatcctcgtcggcgccgaacacaccaatggagcgacagatagactcggcggtattgcggttatcaccggtgatgacgataacacgaattccggcggcgtggcatttcttgatagaatcggcaacctcaggccgagggggatccaacattccgacaagaccaatgagagtcatgttctgttccagcttggtgtagtcctcggtggtggtggcgttcttcaggagggggtttccagagacaccgtcaacacttgcgatggccatgacacgaaggccacggttaccatactcaacaacttcctcggaaagaagcttcaagtgattctgagtcacaggaacgcgagatccattggcgccttgaataacgtacgagcaacggtccaggatgctttcaggggcacccttgaccagtaacttttgtgcctcgccttcgccaacgagaacagacatactcttgcggtcacgggagaactcataggtggccttgaggggaagacgggactcgtagtgagcgctggcggcatgcaatttttcggatgtagggaggcgacgaagtttttggttcaaggcgatgtcggtggatccaattttctcaaccagagtacgcagggcgccttcagtgggctcaccgatgctggagaagactccgctcttggcatcgtgggaaagagtagcgccgttgcaaagggcagcaacctcggccaattgtgccacggtcgatgaagaaacggccaggttctcgacaacattgccattctgggtgagcttgccctcgggagtgaaagtagtgccttcgacgtcaatctcctcgaatccagtgccagagctggtcaggtaaacaatcttctcgacgctcatctggttagtagtcaaggttccagtcttgtcagagcaaattacgctgcagctgccaagggtctcgacagagggaagagaccggacgactgcgttcttttgagccatcttgcgggtacccagagccagacaggtggtaatgaccactgccagaccctctgggatagccgccacaccaagagagacagcaatcttcagatagtagatagctcccttagtccagccaccgaacgcggggtcattgaagttctcatagttgataacccaaaccaggacacagatgatggtaataaccttggcgagcatgtcaccgaagtcgttcagcttctttttcaagggggtcggctcggagatctgagaagtgatgctctcgtggatatctccaatggcagtcgagctaccggtcaacacgaccagagccgtagcgtggccgttgacaacggtggtaccagagaaaagcatgttgatctggtcctgcttgacggcctgctcatccttgatagcccgggtctccttcgcaacactttcgctctcaccagtcagaatagcctggtcgacacggaagctgttgctctgaatggcgagcagtcggcagtcggcaggaacacggtcaccgacagcaatttgaatcacgtctccgggaaccagatcttcggccttgacccttcgcgtcattccatcgcggataaccttggcctcgttggcggaatattcctggagagctgaaattgccttttcggcgctactttcttgggtcactccgacaacagcattgaggatgaggatggtaaggatctgtgaacaacagcaaacctcggtcagcataatagaacacatgggtatacagatgcaacgcaggatatccaggcacttacaacagcggggtccacaaatgcggtccaatcgtcgctctcttcaaagagagctagcacaaaagacacggcggccgagccaaggaggataagaaccaattggtccttaaattgttccaaaatcagttcccacatgggagtcgggggttcttccgcaatagctaaataaacggcagatgtcagttttagccatgtcatcattctgcagcggggtgggtactaaccgttcggtccatactgttgtctggaatggaagaccgcgctctgcgacagaccagtctgctccgacaccttgaagtgctccagcgactctgctggagtacggagaaaggcgttctccatgatcgcgacaccctcaacggcaataggcaggatcaattgcaatagccgcagaggtgaggaataatagttggggtaaagaaggaagaaaaaaaatgggtgcctgtttttaagatagttacatgcccggtgtaacacagagtcgggaaagagaagcagcccaaagcgagggacagggttatattaaaaaaaagaagatccaaagcaagcttggaagaaatgaagatcgaccgaatggggaacctccagtgggggaagtcaacgtgttctcatccatttgattccaggcgctgagtaagcatggacctacctgcgtggggagggcgccccgggggtctacagggctgaaggcgggtcacttgcaattctccgcttcgttttctcttctttctcttctatctttctttgattctgccttggattgagtatgaacgtattgaaagtacctgatacttccgagattgactatctttagcataataagtctcactatatcatgaattggagcgaaagcctctggtagggctccaacgtcatgtcaattcccagcttgccctatgggtctctaggctgcatcgtttcttgcctattagatacatgtaggttttgtgggtaacctttgatcttggcaccttcctaacaagatgagtatgcaatcttctaaatcttctaattcgaccaactcgactcctcactactagtgtgatatagatggacttgtgccatgaccacagctcttgacctatactcggttatcccagggctccggagcatactggatccaacctactcggcccacttatggttggcagggctgagatcttcaaggctaaagcacagtccctgctagatgggtcaagtgtggcatcttcataagcacgctaacatacccttgcctgtagggctgaagctagaaacaaaagtccatattgcatcacttagctatagatcatctactcaatgcctttaaaatcgatttaaatccttaccttggctttgaagttggccaaatagtcatttcaagccacttttagtagccacaaatagaagggaaacgaaagtagaaagtctcttgaattttgctatgcattcgccgatcaattgtgatatgattagtctgataattctagttggttaacctttcaagtttgggaataatcaagctgtggaggtaagaatgcatacggagtactccgtacgtgaacaagaaaccaagcgcctgagtgtctggatgcccttttacatgtccattatgtctttgttcaaaccaggtcaaaataatagtaacaaatatagtaagagaataaaaatccctaccttagttccaactcgcttgaccgcaagttatcacatgctcattgaggatccttagatagtatgatagtagttcatgggggagaaatttaacaaatgtccgaataaaagcgattgctaacaatatatttcactagaatacttttagtctgaactacttgaattatttgaataagactagaatacttgtgatacaacacctaatcttagtgtgtggccgatcaactacatcataaccgaccctattgtctggaaggttctaagagatttgcatcattatcatccccagactcttgcaatgccactgtgatttcactaaaatggaaataaagtggtctctacctcagcacctccagggctagaatggtgtcagttaggtatcggtcggagtccctatgacaaggtagtatggctccatagatacacaaaggggtgtctaggtacgaatcagctagaatcaagccatatatcatactagtccagtctcccgatgtcctgaaaaggagagtcctagtctaatattagcagtacttggtaatgaatacggtcatttataccccaccccgctcaaatgaattccttgttagggggatcgaccgtaaaatgaatactgggccgcggcccaagtaccgtagtacttccacagagcggtgccacaatagggggaagcaggtaccgggtacaagaggacatcgtattattgttatgatccaaatccccccaactcacttcacatcatctctctcccccacttggtcgtctctacccatcttcttctcctgcatctcgcgtctcctactcctttattttaagtctcaagttctaaccacctcgattcaatttcacaatgggttctgaggtacgtggctgtccccttctatcggctgtctcgagttgtcaccgccatcgcaatcccacattcccatcctcatctgagctcacccccatctggaatttttgttgataagaaccgggctaacgagtatcgtaactatgcagcgtgagaagtatgcccatcgtcgcccctatttctgaaacctcgtggcatgactgaccccctcaccagcaagacgttcctcgcgcggctctgcgagcaggccgagcgctacgatggtaagttgacatgcgatggtttggctggatggatatgctgacatgttgcttcttgcttgacagaaatggtcaccttcatgaaggttagtcgcaccctctcgtgttgtttactgagtatccatgctaattgctgaacaggaagtcgccaacgtatgacaccatcattttcccatcacttttgggaccactttgggggtattcgaaattgacacatttctagattggtggcgagctcactgtcgatgagcgtaacctgctttccgttgcctacaagaacgtggtcggtacccgccgtgcctcctggcgcatcatttcctccatcgagcagaaggaggaaaacaagggctccgaggagcacgtcggcatcatccgcgattaccgccagaagattgaaaccgagctggagcaggtgtgccaggatgtgcttgatgttcttgatgaggctctcatccccaaggccgagactggagagtccaaggtcttctactacaagatgtacgtctccaacgaaatttgctttcggtctgttacattttgctgactttgtaaacaggaagggtgattaccaccgctacctcgccgagttcgcttccggccccaagcgcaagggtgccgccaccgctgcccacgaggcctacaaggtaaacaattctcatttcggcttattgtcataggccttctctctttgcaatgaacagttgttgatcgtgtcatagaacgccaccgatgttgcccagaccgaactcactcccactcaccctatccgcctgggtcttgccctgaacttctccgttttctactacgagatcctcaactcgcctgatcgtgcttgccacctcgccaagcaggcattcgacgatgccattgcagagctcgactcgctctccgaggaaagctaccgcgatagcactttgatcatgcagctgctgcgcgacaacctgaccctctggacctcatctgagggcaccgaggccgagagtgccgccaaggaagagaagtccgaggaggagaccgctgctcctgctgttgctgccaccgaggccgctgctcccgccgaggagaagcccgaggaggctaagcccgtcgagactgaagcctaaaggaacattaggggtcgcgacgagccgtatgccgtttggtagggtgggcgttcgcatttattcctggacgtggttatgcaagtcgcttctttgttttcactgcagcgctgggttggaccggcagatatcttgcacgtcttcgggaccgtgtgggtcggccggcggagtttgatattcggttgacgcgagcggaaaaggggctgagtggaaatttctctctcttttattgtctctattcccactccagcacgtttcaatgtgtttattttccattccacccgagcttctctacttgacatgcaccctgtgttaggttgcttgcgtagccaatgattccccttttaccagtattcatgactgaagtataagccgatagagtaaacctagttattcctttattcctttcactcgactcgctggttgattagtcctaaagccttgacgaacacagatatctacagatgagcatgtgcattaatgcttcgaagttaaccaaattcccactgtcttcccctatattgcttacccaaagctgccatcatcctcagacacatctgaggctcatctctaggaaaataccggcacgcccccacctccaaagcaaagacaccggcacgtccgacaattccaacaactaaaaagcgccacagaagacgccatcccatcaagcaccgaagacgcagaaccaacaccatcggggaccaacatccctcgaacgattcgtcggagccaagagccggacagcaacaccaccgggcccaatgcggctctaacaatccccaacccgctatttcccattctcgaagtgaactcaaccgaaacacacgtcttcccaccaacgaagagtagccaatcgaaaccggacgttttgagcgccacgggagggtccgggcacttgcttgaatatgacagctgggcaggcgggcatcacattgcatgcaatgcatactgcaatcgtggtgtggtgacaggagagtgggggaatgccacgagggcgaaacggcggtgttggcgaattgtggctggaggggttgaggatgcgattggttttgttggttgatccctgcgtgtgtgttatcttactctctttgtggtataggtggactggcgaagtttgtttcacttaaggattgcatactcgctaggttttgtgtctgcagcgagtcagatgggtgttatagagtatgtgtttttttggatgttctgagtatatggcacaatgtcgattgatatagatcgaatttgtcatgaagcctttattcaatgattttgacttgtgttggtcccagagcctcatatcagggctcttaacggtcctatttgtttgcttagttcttggcaacagctgggatgaatgcaagctcttcttgtcgatcttttctaccgacctgtttctaatgaaaccgattgaagatgagcagaaagtctgaagtctacgatgtcggtaaatgatttaaatttagattccaatatatagttagatgaagatgcaacttgaagagacctgacaggtatcattttggtgaatgaaattgagcatgtagtcgctgtacgaagatctcctgtatcatcttccataggtagacacagacacatgaccaagccaacaaatcctagttcattgcacttgcatacatatgtatgtagtatgcacagctacatcaccccagttatacggaccctatcatgcaagtagagattgggcagatgcattaggattagaatctcgtctagagaacctttctcgattgcccccggcatgcatccgactccatgccatcgggatattccaaagatccgcgggatgtacgaggtaaaagcaatgcacatagtcaattccacatcttcccgcaacgcgttatataaaataacgccgaggacaccaaaactacacaaaatcttcatcttaagcagtcttttataacaagaaaccccaaaagaacaatccaatccaatccactataataaccaaaagtcccaaacaatgtcactcccacaacccctgcccctcgaaccagacgccctctacatcctcctcctcgacctaggcggcagctgcctcttcgaatggagactatacctcgcgtcaacgcacacaaccggccaaaccttccacataaccaacgagacaggcccagtaaactggcaatacaaaagcgaagccgtgtacaacatagcaagcgacatgcgggtggtgctagcgctgcaaattggcgtcgtcgggcccgtgctgcacgccgcgctggggtcacgtctggcactcatcccgctgacgctgtactcggctcggttccgggagggcctttcttgccgcgtgtgggtgcaggaggggctttttgcgttggatgatgagggatatctggatcttaccaggagtgttgcggatatcgagcaggaggctagacagcttgggatgctgaataaaagtcgggggtctaggtcggtggttaggagtagggggtttgtgggttgaatttatgattgtaatgggtggttattagctgtgggggttgtcatgatgtatgtgaagtcatgtaataatcggaatggattgggtctttctttctatgggttacttgtgcccaagcatttgagataggaggggatgtacagagcgatgttgtggaaaagtagaagaaaaaatagaaggggtaacattggacccggcagagataacctgcatataggtgaggcagaaatagaagatgtagatcttccttttaaggtgcgtattttcaagggatcaggggggaaaagcgaaacaattcaaatggagactggtcgtccgtattcacattcacataaagtcatcatccccaagatcatcaccaccctcgtagttggtgtgatcgacctggctgtcgcggctggcgttcagcgagatcttggtctttgccgccttggacttcttattgcccttgtcagaagcacgctcctcgcgcatcttctcgttggaagcagtagtgagagcactagcaatcttcttgatctcagcactaggcaagtccttcacaagcttacgggtgaagtcctgcgcccagagagagtagtggggcttcttggagtgcaaggtgaggagcggcacgagggtatcactcagacgggcgaactggtccttggtgacgggcttgaacagcggcatggcggacagatcgacggccttggtaggatcggttgagtcgctgacaacgacggccttgggggcgcccttgttgcgcttgagatcaacagtgccgaaaagatcctcggcgtgggcaagatcggcttcctgctcggtcgcgcgcagacgagcgcggcggtctgcctcgtcttcactctcagattcgccgctgccctgttcccgtaggcgctgtagccggagttcctctatccgctgggctttggtcttcttgttggcggcggcgacggccttggccttggcttcggcttcggtggccttcttggccttctcgcgctctacctcggaatcttcggcggcatcccatgagtcaagaacctatattcggggttgttagtttgttgttccttggcgcgaaggtgaggggcctgctggacaggttcgaggttgcgttgccttacatcttcttcctcttcgtcatcgaaacggcggcgaggcgcggcaacaataggaggaggcgcggagctctcctcttcttcttcatctgcgtgagatcaaaaagattagcaacagcaacatgaaccaaaacacgagctaagtaactgtggcaatcgctatagaaggataatacaaggataataacataccccacttggaaggcggcattttgagcaatctaaaaactcgttgatacgaaagaaatgaaggaacgtaatgcgctacacgcaaggccaaaaggaacaagccaacaacaggacccagcaatggaggggcgagggcaaattttatgtgggacacacttatcgtccccaggtgggatgttcacgtgatctcgggcattggatgcccgatgagcatgatctttgttcgtatcccatacatataggctgttcatttacttatttctaacttatcaggtggtggaaatttgttttcattgaaaaagatcctattaaattcataatcatcatgggcgatggctccgtagatcgtccaaccatcgtttttgatgggccctcatcaggcccgatctatgctgccgaaaggcggcatttacaggttgacagcagtgcggaacttctcgccagcgtagatagcgttggcaccaagctcctcctcaatacggaggatctggttgagcttggcaagacgctcggagcgggcaggggcaccggtcttgatctgaccggcgcggaggccaacggcgatgtcagcaatggtgacatcctcggtctcaccggagcggtgggagaccatgacaccccagccgtcggcgtaggagtccttggcagcctggatagactcggtcaaggtaccaatctggttgaccttcaggagaagggcgttgcaggacttgagctcaatggccttcttgatgcgcagagggttggtgacagtcaagtcatcaccgacaatctggaagtcagaggtcttgtagaagtagctccaggcctcccagtcgtcctcagcgaaggggtcctcgatggagacaatggggtacttggcagcgagcgacttgtagaggtcggcaagctgctcgtaggtgagccacttggtggggtcgctctcggggttcttgaagtcaagatcgtacttcttctcgtccaccttgtagaactcgctggaggcaacatccatggcaatcttgatctgcccagtgtaaccagcctgctcaatggcctcggtgatgaggtccagagcctcctcggcagtctgaatatcgggagcgacaccaccctcgtcaccgacgttaccggcagactgaccgtacttcttcttggcgagatccttgagcttgtggtaaacctcggtaccctggcggagaccctcggagaaagtgggagcggtactgtatttggtcagtttatagttgcaataaattcaaggctggaggacctactcgggcacaatcatgaactcctggaaggcgagacggccaccggcgtgggagccaccgttcaggacgttctggaagggaacggggaggacgtagggcttcttggttccggcaaggtcggagatgtgagcgtagagggggacacccttctcagcggcgccagccttggcaacagccagggagacaccgaggatggcgttggcaccgagcttgcccttgttgggggttccatcgagcttgttcaggaactcgtcgaccttggcctggtccttaacatcgatgttctccttgatgagggcggggccaatgatgtcgttgacgttcttgacggccttgaggacacctaatttgagatgaggatatcagtttctgatcactttagaggtgtcaaccgggttcattcacttacccttaccaccccacttggtcttgtcaccatcgcggagctcaacggcctcgtgctggcctaggagtgaatgttagcattgaggtcctttttcccctttttaccatctagacttcaaggacaacataccagtggaagcaccggagggaacaatggcgcggtgaaggccggtctcggtaacaacatccacctcaacggtggggttgccgcgcgagtcgtacacggagcgagcgtggatcttagagataggcatgttgtaattggacaggctgatgatagattcagtcagttgtaagaaaggagaaaaagcagatatgggctgatatatggcaaaagctgcaggtgactaacggcgggggaagttcaccgatgacccaaaaagattgggcgggagaggtgagaaggatatgatttgcttggagagagctcaacgaggggcaagttcctactacgatcaccgggaggcctttggttgggtttctgttcctttccagaagacttgggagggttgtagcaggtcgttggagggggatatgtgtactttggaggggtagatgatggtgttatggtggggtatatgatgttatggtggttatgatgcgatgatgctatattcagatactcacctgttaaatcagaacaacttgataaataaaaggagacctcctacggacacacccgactacttaaatactttcccccagagaaaccccgggaaagctcattgctgctccgattctttccaatgcaacagtggggctccacggccgctctccagtactcgctggctggtccgaccttatgcggcctccttagctacgagatctcccgtccctcggaagatattagactatgatggcatcccgttctcccgattgccttccttgttataggacgtgcacatcgtacggcatacccctctacccctctattgcgcattagtctaactgcaggattgtttactgttgtctagaccgatgttaccttcagggctacgtggttcgaaacagaaagtggtcatcttacgtagcattcattcgtgttcattcgcattcattcgcattccttccaaggttccactctgactctggcgaaccttggaagacagcagttggcgcctgattgctaaggccaagctgtctcggaccgagttccgggctaatgatcttcctttccgggcagtttccattatcaattcataaccagaagggaaacgaggactggttggacagtataaaggaaaaaccacaagatataggcaatgcatagagaccaaagggagaagaaaaggcccaaaagaactgaaagtagaggtcaaacagatggaggctgaataaatagggaatccaattccaaggtcatcatcaccacatttatcaagtcttattacatacaagaatagcttgggttcttgaattcaaacttgtcaaacttattgccttacgctcaaggctgtgagagcgttcctgccttaggtgtctgttatgacataagacaactcggaggtcatgtgatcgtctcaatggacgccgcgctggaagctggaagctccccaggcaaggtgctatcttcctaatcacgatatccatccatttcgcatcgaccttatacgaaaccctggattcatactcgaattacagtctttctctggctaccatcccaactcgtccacactcggtgaatctatcgttcgtccgtccttaatcatgagcgacccggagcgcggccaggcgctcgaggaatataaaaagagcttgctcgagctacgagaatgggaggccaagttgaaaacccttcgcttgggtatcaaggatcttcaaagagagtttgatgtctccgaggataacatcaaggcactacaaagtgttggtcagatcatcggcgaggtgctgaaacagctcgacgaagagcgatgtaagtatccaaggctcaagatattcgtttcaatgatcgcattaagaagctaatccgctgtacagtcatcgtcaaggcgtcctcgggtcctcgatatgtggtcggttgtcgttcaaaggtggataagtccaagatgaagcaaggcacacgtgtggccttggatatgacaacactcaccatcatgcggatgctgcctcgtgaagttgaccccatggtgtacagcatgtctttggaagatccagggtccgtcagcttcgctggtatcggtggtctgaacgaccagatcagagagctccgtgaggtcatcgaactacctctgaagaatccagaactcttcatcagagttggaattaagccccccaagggtgttctcctctacggtcctccgggtactggtaagacgctgcttgcacgagcagtggccagctcgatagagaccaacttcttgaagggtatgttcaacttctgaaagcatttacagctgcgatgttctgaccggtctactctcctcagttgtatcctcggccatcgtggacaaatatatcggtgaatccgctcgactgatccgagagatgttcggatacgccaaggaacacgagccctgcattattttcatggacgagatcgatgccattggtggacgacgattctcagagggcacatccgcagatcgagaaattcagcggacgctcatggagttactgaaccagctggacggtttcgactacctaggaaagacaaagatcatcatggccaccaaccgacccgatacactagaccctgccctgctgcgtgccggtcgtctggaccgcaagatcgagattcctctccccaatgaggttggccgtctggagatcttgaagatccacacaagcacagtccaacaggaaggagatatcgactttgagagtgtggtcaagatgagcgatggtcttaacggtgctgatctccgaaacgtggttactgaagcgtgagtgacaaatcttccttcataatatgcgtgtactcgttggctaactctttattagtggtctgttcgcgatcaaggattaccgtgacgctatcaaccaggatgacatgaacaaggctgtacggaaggtggccgaggcgaagaagctggagggcaagcttgagtatcagaagctgtaattgtatctaccttgcggggctggtggcccacatcatctggtgcacggtttagatctttgtcttgaagcgctaatgctatgcattcgacctattcttctattgttgattcaagtactccgtagatcaggggatcttaggaacaacaacttgcctaagtaacagttaaaaaagaagctacttcgagaaaaaatgaaggaccttgggttcgattggtagctcgatgccctgttcatttatgtactcattatatagctatgaggccggttacgcgtacaatgcgatatgatttgcggacccctagtgttgcctctccacttccccagcttccttcaacctgcccttgccacgttctcggttttcgcgccaatttcgtctcgaattagattgaaagcttgttgcgacacttggcgtttatctaccttagcattacccaggacacgcgggataaactccgcgctccgcatctccgcagagaaattctttacggacaacgaaaccaccaaacaaaactgtatcggtgcatgttggcttttagatccgagagaccagattgtctttgcgatcgacacttgttcattacaatcgcgccggaaagggttgtactccggtaagtgtgcaggtctggcccgaggggttagctcctcgtcccccaggctgaggatcaaacctgactaactgttgcaagatacgcgtgtatgaaccttgatatagaatcttaatcaacaccaaacaaggcgaatcctccgatagcacctctacctcctcctgctcactcccatgttgcgcactcggtaatcgcaagaccggcagacaagagaccagatcgaagagaacaatggcctaccagccatcgcgcagtcccttcgcgcccgcgcaacaagacggcttctacggaaaccctcgtagtgggctccgcggatacgggctgtcgaaccagcctatccccctgtccaataaagtgaacggctacttcgaaaaggaccgcacactacctttatacaaagataagccgttctttgcgccgcggcgcacgggtcctcgaaggagatggaagccgttcctcaacgtgctaggggtgtgtacagtcttattcttgttgtattataacttctaccttcgcacgtggtcagggctacagtcaaatgacaagggggccgaattatggaaatgggcccagacattagaggatgggaaatcttctggggacttgtctgactggactgcaagacgagagaaagtgcgggacgccttcatcgtcagttgggaaggatatgagaagaacgcatggggtaagtcatacagtatccttgtgtgctatgatagcagctgacaccattatccagggtacgatcagtatcgcccagtatcgaatgttaatcaggcagacacgagcggcgggctaggctggatgataattgactccctggacacattgatgatcatgaatctgacctccaaggtccatcgcgcgcggcaatggatctcaacatcgttgaattatgatcaggaccgtgatgttaatacgttcgagacgactatccgcatgctgggtggcttgctgtctgcgcactatctgtcaacccaatatcctgatttggcacccctcaacgacgatgatgtcggtgctgccggtgaagacttgtacattgagaaagcagctgatctcgccgagcggctaatcggggcctttgagtctccaagcggtatcccatggtcgaatgtcaatctcaacacgtcagaaggtgttgtcgtgcatttcgacgagggggctacgtctattgccgaggctggttcagtacaacttgaattcaagtatttggccaagctgactggcgaggccgaatattggaaattggtcgaaagaacgatgaagctggttgacctacaaaagccacaggacggccttgtccgaaccgccatccatcctgacagcggtgcattcaaaggagacagcattagtctgggtagtaagactgattcttactacggtatgttgatagtacttggtgcccgtagttctttcaagctgactcgctctagaatatctcatcaagcaatacctgcagacctcagaacaggagcccgtctacaaagaaatgtgggatgaagcattgagaggcatccgcaagcacctagtctcattcaccaagaacgctcagctgatgattatcggcgaacggccccagggcctaggccaggaactgttacccagaatggaccacctagtctgcttcatgcctggcacaatcgcactcggtgcgacaggtggccagcccttatcccaagcccgaaagtcagcggattggactcaacagcgcgaggacgagatcctcatgtccagagaattaatgaagacctgctgggcaatgcaccaggccacggcaaccggcctcgcagccgagatctcccacttcgtcttagactcgccgcctgtgatgatggcagacaagtaccccgatccagtggcaaaccccaaccacgcatccaagcccgagatactgcgcggcatttcccagccactagaggcgcaaagcgatgggtccgagccctggcgtgcggacatcgacatccgccgcaacgaccgacacaatctacaacgcccggaaaccgtcgagtccctcttctatctctatcgtatcaccggcgacgacatctaccgccaatggggctgggagattttcaaatctttcatcaaacacacagccgtggttgaaaagaaaagtacctcctcgcgtattccgacatcaaccaagacagcacctgttttccgtatcaagggctttacgtcgcttggaaacgtggatgcagtcccttcatacaagcgcgataacatggagagctattggatggctgagacgcttaagtatttctatttgttgttctcggatcgggatttcatctcactggaggaccacgttttcaatactgaggcgcatccattcccgcggtttaagcctagtggggatctaaagacggggtgggagagagcgcctagaaagtagatttcgtgggcgctttgttctaatggagccttggttggctatgttttgatgtctcttatatgttccgtatagcgcttttttccgtgcttttcctttgccctctggggaaacctagatttgtataccaacatgctgtacatggccgatgttactttctgaaagcaatactccttgttcacattagcattttatatgtaaggtaaaatcacctctattctgctgggacttgaaataacccaatggcgggacctagtaaccgaaattatgtgaacatagctccagataccacacccctaccagatgatatacaactagaaatcaatcatacaaccacctcgcccttagcctctctttccagcgcagcctcaatcaactttttataaccaaccacagcctccttgatctggcggacagtcaaggcctcattatcaccatgagcaacaaagatacttccaggcccatacaagtagcgcttgacaccagggccgacagccagattcggcacatcagtaccgtagttaacagtcgtaacatcaaacccatcaacatcaacatccaaatcctgcggcgggtaagactcgccatgcgaaacaaagtccacaacaacctccgcctcgaaaccccgaaccgcctcctcaacagcgcgctggataatctcacccgcctcagcaggcgttccagcggcaagtctcacagcaacatccgcccacgcctcagaaggaacgacattcgtcgcgacgccagcgcggataacgccaatattcagcgtcgtcggcccgtacttcggggaggcaggcaggccgccctcttcggtggggatatcgccgagcacgtcgacgcgcgagagcgcaggcagaatcgctgacacggcgctcttgcccagccacgggtatcctgagtgggcggcgctgccgtgcgcaaggaccttgaagccgagcatgcccttgtggccggcaacgagggctgcctcggttggctcgccgaagatgatggtgttgatggcgcttttcgcgttgaggcttgagtccgagaagagtttcatgccatcgccgccgatttcttcgccgaccacgaagagaaggccgagcttggcgtctggttgtgaggctagggtttcgagggttgcgaagatttgggctgcgacgctgccctttgcgtcgacggagccgcggcctgctatgatgaggttctctgggtcgaaggtggtggagtcggagatgggctggtgcacggagtatgggatgaagggcgggactgtgtcgatgtggcttgtgaggaggattgaggggggttgtgtgtaggattttggaacagcgtagatgttgtagcgcgtcttggttttctcttggtccttcactgggggcacctcttgcttcaccacggtgaagttccgggcctccaggaactgcgcgacgaagaggccgacatcgtgctcgttaccggagagtgactcgatctcgaccaggtctcggtggaacgacagtagaggtgaactgctgattatatcatctaggcctgcttggctgtagctgggctgggaggaggatggcacgcccaggagttgttgctgaagtgcggggtgcggagaagcctggacgccggaaatgatggccgcagccgcgagatatgaagagagcttcattggaaggtcggggtacaaatatgttccaattgttaatttgctgtgtccaatgcaattgaacagcccctacgccctgaacgttgagtgttttgcgaagcttgtagatcggagatccgaggtcggccccgatgtatacggtcacgtggatagataaacatatcgaccggctcgtcctattggccacatattatcaggtctgtggtgctcgttattgcgtgatggattcaatgtcagatacaatgccagatacaatgccagatacaatgccagatgccttcattcacgtctatttcattcggcaaattcctaacccgacaacatatgtatagctcgtattcgttaggcgagctggcccacccagacgcgccgattaattcaagtcccgaagctctacaaatttagcagaacaccgagtggatattattggatattattggctgtccaagctttcctagaacaaggaaatcactttgattcgtgaaagtacatagcacagtctaacgctccgaagctaaattaattgtctccgatttaaacgggtagctcgtgttaatggatacactcgcgattcccgggtttaaaagtgatctccgtgcatattcacttcttataatcctatactagtgaaaccggcctcaccgaggctatgagcgtcattgggctcgatgctttcaaaagtactagaatagtgttggcacgacgatccaaaaacacagccctcggactacacatctcagccagccacatactacttctatgatcagccctacaactcagttgggttaacacatttcagctgggtatttttaaaacttaatacatacatattcggtttcgaacactaaccttagtgaataaagccgacaccgaaatcgtttgtacgcagagagaactacgtcgacgggcttcgcgaatcaaagctttacttttaacaggaccacaacgctcacccggtctatccgatcgtgtattgaaccaatttgccaaaggctgctagcttgtaatgtatagcgctattttattgggggaggaaggaatcacatatgtaccagctgaaaacgaagagaagtaaaagtggaccggatatagaacggaaatacccacctacccacccagggagggagccctatcgactcaagaagcttctaaatagattaccgaacaggtggaactcgttggtggaagcaattgaaccatcccccccctcccccctgcctggcatgcatggagaaccggaatctgctctagaaccacatacgcgctgaacccaggcgtagttggtgtcagataacagaggatagaataaataggtgtccagatagatattcattctagtttaattaatttgatggcgtttaggtgaaatctatatctcaaatccaacggctttggttgggtaaccatctcgcttattggatacgtttataagatctttagtacccagatatccacctcgtatagccctgtgtcgttatctacggagtactccgtatgttttatagaatcaatgttataccggggtatcttattgcgcacattcacgagggatatgagctggaaacctgcaatgatgtatgatcgacatgcaccatcacaacttggcatacttgaaaattgtgagttcagctcgttgttctgtattggacccacctgtcagtcagatattcacgttcccgatgaagcccggcactgatggcccgggagcgcggatgggttcgatcgttatgaagccaaaataaagcatactaatgctcggtaccgcgaatacgccccaggtggggatgagactaatgccataggagcaatgatctacgcgttcatgcttgtcacttcatatattatacatcgtatgtggtacatagtgacaataatgaacggtgattggcacatcggtgatatgtttccaggtgatataaatatggatgcccccttcagatgagtatttctaacacagcattcttactacgttagtttacttgcttcctgacatccgaatcattcatcctaagcaagaacatggaatcttttcggaaaagactgcttgcgacaacgatcgatgagcaggctgaaaccaaacccactcaacgatttgcagttatttcacagggattggacctcagcaatgggctccgagacatttcaatcaaagacctggcacaggccgtgaacttcatgtgttggtggattgagagcatcattggaccggcacactctgactccccagagacggtggcctatatggggggcaacgatgtgcgctatctcatcttctttcttgcatgccagaagactggatatcaggtaaggaaacatgccactcaaactgagaatagaacagccggactgactcttataggccttcttgccttctaccaggaactcagacgaagcgtatgttcatctactgagcgcgataaactgcacaaagttcttcttcggcgaggagcgtcaagaacgagtactggagatacagggacttgttccgaaattggacatcttccaggccccgaccctgaacacaatcctcagcgacgagagtggtctacgccactacccatataccaagtcctatgccgatgcagaggatgacattgtttgcatcatccatagctctggaacgacaggtaaatcccatgaacgtggcactgtgactatgaaccaagctaattcccgacaggcatgcccaagccggtgtatctcaccaacggcttcatcatgacctttgattctgtcacttaccttgaaaagccaccaggtcgccggccaaatacattccacgagctggatcaaagtcagctgctgctggccgcggcacctttcttccatctgatgggactagtaacattcatcttctcggtgtggaacgaatgtcccatgttcgttgcccccgataagccactctctgtcgactatatgatagagctgctgagcactggccaccccacagtcgcactcctgccaccctcggtcctggaagatatgagccaatccgagaaagcactagctagtttgaaagaagtcaaaaaagtgtatttcgccggcgcgcctctgcccctagagatcggcgagaaattgcgcaagtatacggagatcataacggtaattggaagcagtgaggccggcgtgatcccagggctaataccggaggacaaaaccaactggggctacttcgaatggaatgaagactacggagtggaaatgcaagacaccggcggcggcgtgttcgagttggtgattcctcggaagaaggattctcgcgactggaaggccgttttccacacatatcccgagctcgatgcgtatccaaccaacgatctcttcacccaacacccgacggacccacgtctgtggaagttctgcgggcgcaaggacgatgtgattgtcctcagcaatggcgaaaagtttaatcctatcgggatggagggtatcatcgagggacacccgctggttcggaaggcggtggtagtcggccagtcccggttccaggccggactgctcgtcgatccgagtcctgcgggatgggatatggacccgaaggtctttattgaggagatctggccggtagtacaggcggctaaccagaccatcgcggctcatggccgggtaatgaagaacaagatcaggctcgctgtgaagacaaagccattccagacgactcctaagggtaacgtgcggcgccggatggtgcttcaggactacgaggaagagattgatataatatataccgaggacctcgtggatgacttggaccagtctctaccgcagacgttagatcatgagagtcttacggagtatatccgccaggttattacccgtgtcctggagaaacccgagatcgcagatgatcaggacttttacgctgccggtcttgattctctaatgaccattcatgcctctcggatactgcaaaagggcattcagctacgtcggccggatgtagaagcaggagccatcaacgcccagacgatctatggcaaccccacagtcgaccgattgtctcaatccgtgatggacatcttagatggaagagcccaagctgatatcccgcgagcagagaagatcaagagtctgctggagaagtatacgtctgatcttccagtgcgggaagtctaccgcgagaatggattgccctcgccttcgactgtgattctaaccggttcaactggctcactgggtacttatctcctgcatgatctactaaacagcgattccatcaccaagatctactgcctcaatcgttcggatgccgaagcacgacagaagaaaggcttcgaagaaaaaggcttacacttcgacgaaaacgactggaaagacaaggtcgagttcctacaagtctcattcggagaaccacaattcggcctggacgagtccaagtaccaggaacttctcgactcggtcgacaccatcatccacaacgcctggaaagtcgacttcaaccactccgtcgattcgttcgagggcactcacatccggggtgtgcggcgctttatcgacttcagcttgaacagccgcaacaacgcccatgttcacttcgtctcctccatcagcacggtaggcgcttggacccccgacaagggagatctggtcccagaagtaccgatcgacgacatttcagtcgttctctcacagggctacggcgagtccaagcacattgccgagcgcatctgtctcgaggcatcgcaaagatctcaagtccccacgtcggtacatcgcgtcggacagatcgcgggaccgactagcgcgcgcggacagtggaatcgacaggaatggctgccgacgatcattgcgacgtcaaaagcgatgggtaaaatccccgaccaactcggctcggtcgcggtcgattgggttccagtggtaagtcccccggaaattatgattcactagctcagccaagagaaaaaaattttaattttctaacttgattttaggacacactatccaatattatagtggaaattgtcaacacacgtcatcgggactcctccgaagcaagatctgccgtgtttcatctcaccaatcccgagcagacatcatggtcgacgttgatcccggcggtccagagcgagtatgcagtcgagccagttgcgttctcgaggtggcttggcgagctggagagtatcaccaatcccagcagtgaggaagttgcctccaagccggcactcaagctgctgggtttctaccgggggttggaaggcgagggcagtgccttgtctgtaccgctggatgtccagcggacgaaagcggcaagtgccagcatgagagcgctgggcgcggtctctccctcgttgatgcgaaactggctgcagcaatggcaattctgattaatatagcttatattggattatatctcgaattaatttatctcatgtccacggtgtatattgcttccaaggttatcgtaaggcttgaacatgacataagtcgtgactgtgcgcgaccggagcttcctcattgggtgattacctcagaaacccacccgattaggtttctttttcgcttggctgggtcggcttttgctatttgccgagcggctgtgattggtctgcagactcgggctatgccctttttgggctgcagggtggtctgttcggtgctagttctctgcagggatgccttagcgagcgatgcgatcggagagatctccaggggcaaaaagaagaacgaaaggatttgatatatcttgatctgtcaacagatatcgcaacaagcgacatgtcgcccgaagaatcaaaatcgacttatcgagcgtatcttcagggctgacaacctatctgtcgccctgaacaagcccgatcccccgatcgccgcgccaaggctcgcctcccaacccccaaaggcacacccggcgggcagaagcagtggcgccaaacaccatggttctcttcccttttccccttctcgcccctccaatcattgcaacatatgatatgatggaatgttccccgaattccccgagaacgttggttcgagccatgtggacctgacgtctgccaaaggggactttgcctttttctttctctttcccctacctctcccatggtacggccttgggtacctattcatattttgatgggattatgattggatgttctttcatctagtactacttgcggttgtatggaggtagtgctctgatgtctagtccaggtctagttcggagttcaagtttatcgtaggacggacagcaatatgatagtatacatcattccgtgccctagttatgtggtatataatttttcgaaccgataaccctccattgtgcgacccaactcgtcatactcggacaaagttctgacctccacgggacggggccttgtccgcggttgctcaacgttgtcggagctctacaacgtacatatacaactacaacatacaaacggggtggatgcaccagtccgtgcgtaggagtatacccggttattcgttgaaggataaccgagtacggagtaaacagacaagaatagctggagcggatgtatccaacaccttttccccccaatcctgcaaagcgaatcagcaccgatcgactgggtcgcaatggcatcataaatggttcccctcttgcatccacatcagtctagattgccgatcgcacacacagggattttggatggagtccggagtattcaattgagaaaagggtcctggaggaggggatgtagaacacattgggctacacggcatatctgtgtagccgttgggggtggtttgaaaaacaatcgaattagaagggatcgtacattgagtccttacgaagttacaacataacatgcatggataaatataaatctaaatatgaaaataaaaataaaagaataaagaatccttccagactctgctgctaccatggttcaagctgtgtcaaccaccggaactagacggagcgaaccttgggaaaagaccttttggatcggcaacggtcaatttgggtttagtcaccttttctttttttttcttttttttttttctttctttgggaatccgatggaattctccactgacagttgtttggtctagagccaacaacatcctctcgattcctatttccctttctcacatatctcctcttcatcttcatatattcatctctgtatccattccatatatccatcccatctgtcctgctctacaaaacaaagccagaaactgtacgacccaggatctccctgttcccttccccagtccgtttgccgatgtaagcaaaagcaccgaaacctctctttctgcccagccagttagtctcatcaacttgtttggtccacgtcgctcgggggaattcattttcgttttctttttcccttttctgtatttcgaatttctgtatttttggcagccctgcctggacgataatcgacatttccccgtcttcatcggatgctaactggtagaccctcagttcccgcgtttcccggactattactactactatctttccatcacaccgccacgtcctttcccgcccaaaaggccattgagggaatgacttgttcaaactgagcgttgtctctcttttatattgtggccacccctcgcatccaatgctgaacggcaacaaatccctatataccagccaccccgtccaagcggcgctcacctcgtgagaatgtacaaactgtctcaaattatcgacgcgacacgagaaagtctcgacgcgctcgaatcgcctctacgccagccgcactctccattgactattaatacctccgcgccggcctcgcctgctgtttctttgttctccgccgcaggccacaaccgggtctccagctcggtctcgtccttggtctcttcgtccggtctggggaactcaatggacagttccagtcggagtcagttgaccggagtcaaggaagaggattgcacacgcgactcattggaagatcattatttccgtatgtgcctatcgccaaaactcccccgatatgcagttgctaaccagaccttctatagaacactttgatcgcatgtctgcggcagattcatacttttctcccatcgataactcagatacctacgatctaagtgtcactggcatggagactgccccatcaccgaaaaagaggcgttccggctcagacactatgtcattaaagggcgtctcgcgcattaactcgcacatctcaaccatgtcagcccggtggaagactaagcgatcctccagtggtgatggcgatacgttcccggatgctctacggtctcgcgcgaactccgcggcctcctccgccttggcaagtcccaccactgggcctgtacctgtgagccgggtcgactctattcccccttctcccgcgcgaaccattttcgaggagcgcgcgagcgagtcgagcgtgcgcccaattgatatcacccgcgcgaacagtctcagccaggacgacaacgatgtgcagcaagcgacaacccctctcctgccaccatttatgagagacgacccaatgagcaatgcgtcccgcgtccagtcacctctgcagtctccgtcagtcgcagatgcgagtgaagcagcgtactatacctgtaatgtgacctcggacccgcggtttatgggaaatcttccctccccaccactctcgtccaagccttctgtggcctccttcaaccggccacgagccagtaccgtgcgcacagtctcaggcgatgtaacgcccctcgtcctctccgatcccaatgatgaatgggccaacaaactcggccacgccaatttcactatcatgcctgagccttatgaacccgtagtttgtgacctcggccatttccagcagctgcggggagactgggacattgcgcgttgcaactttgccaagcaccttgtccgcactggcgaacactacggtatgacctcgaacatctataagctcaccattgataaatgggattcgatcaaccgcgagtgggcaaagcagcacgaggccatgctcgaccagctcagcgcgatagatggtgttgctctcacgctcacccattccaatatccacccttgccaacagctccgtatcccccgtctgcatgacaacgacaagttccccgagatgggggatgaggatattgtcggcccaatgactgtggcaccggctgcggagcttgcaggtccctgccgttctgagaaaaagagaagtttcttccgctttttccaggacttggtctcccgaccttgagacctgagtcttcgttaggctcttgtcttttgtctttttcatttccacattttcaagcgatccgcaacgataatgacgatagattattccccgcgcgcattctgactcgttcaatctcgcccgcactgttacgattaatgtctctcttttactcttttctttttattttttctgtaatgactctcatgactcacgatccggatcagcgactactgtctcgccccgcatcatgccattcttttgtctatattgcgagtcttgtcttttctgggggctatcttttcttctctttcttggtcctggatgtcttcctgcgtttccaccgaagacatccacttccttcaacagccgacaagaaagagaacgaaaagtgaacccctaactgactgggtgtgccacccttctccttgattttgtctccattacatactataccccccatacaccaagcctaccaaccgttgtaccccatagacttcaaccttactcatatctctgcttcacagcagaacaggacaaaaacgtgaaaagcatctgaaaaagtaccatacaatgtttctatatgtatatatccgtcttgatttctgcacaatacacatatgtttcatatacgaatgtcttattacatctgcatctaattctcaatgaacataatattatgaaaccctcatgtccatatcatttgaagggatgacacggtgcataatagaatcccacgtggaaaagacacttatcggatatgacctccaaggctactgttgcatgtgagtcacatggagaataaacacggtggagagaaagtgacctggtaactagttagagtggatcagccacgttgtgctcttaataataaagagaattcaccccgcgtcataccccgatgcctcgcttctggatgactcttccggtgagactaattttttcacggcgggtaagatattctcgccataaccgcggggttcagccctagtactatccgaagtaacaagttttcagtatcgaacttcgtaagaatttcaacttgatatacaattgaagcaattaatcaaagcgcggttctacaaccccctaaatagtgactctaactacatagcctagaccatgaaagaaaagaaaagcatacttgctactcctagttactccgtactcacgatattagactcgcctagactcggtcatgtcggtctgggctagtgttatcggcgctgcctcgtctccataaatcctttgtgagaatcctttgttgtacgtgagaatccttgcaaaaagttcttcgactcgttctaggaaggatccggttgctacctaagtacggagtacggagtactccggtggatagatgatagatagagactagatactccattgcctcgggtgtacctgcctcgctatctagagtcttattgctaagccatcttgtaatgatccgaataaaaaagtggcctcgggatgaagtaggattggaccggtgaggcaccctaggtacatacagcattgaattgggtcttgttcaattgccataaaaactagttatacaggcggcatagttagttagataatctaccagatcctcgctagttactcagtcaggatgtggtaacaagtgcgctcttaaccctaagtcttacaaaaaaacatcttgtgtccagcgggtagaaaaaaaaacagcaaaaaagtgagcactgagtgtggatcgaacacacgacaacctgatttgcaatcaggcattctaccactaaattaccagtgcgccagaaccctagaccgctaggctattggtcctgttttgtgatttgttttatggtttagggaaatataacatacatttcgtaatgctcaatgtatacaactagcatccggcttgtttttcaatgcgacagacagcttgtgcacaacatataattgtatgcaaatttctataattacatctataaatatctacaattctcatcatgaatataatctatgaaagaccatgtacgtgtcctgtcattagaaaccctggacgacacggtgcataatagaatcccccgcacgtgggagagacagtcggacatgaccactatttaccgaggcatagttcaagcggaaagcgcgctgcatatgagtcacatgtatgtatgtagaataactagttaacggtgcagggaaatggtttggtagagtggatcggccacgttgtgaagctaccgccatttgatcctctcgaacggctggattgggcctctgatactgataacaagtctgcatggtccaatccgtattgagagtgcctcggtttaatctttagttaggtcttgagattgtgagtcagagactctgtctttcagattcagattgcgtctggatccggtaactagagtgtatgtaattgattgtgtactgagtgcgataattggtcgcttactaccatgattacatgacgtatacctatgtatgtgttttatgcgccattctcgggatatatgtaggccatgtctgaggacatgcaagatattccaaatcgcattggatatccctccctcagcctcgggatccaggcagagctgagaatctcggatctaagattatcacagaaccgaaacatgcattgaggcagttgagatcaatattcgcgcatttgaggtccggtgaaactccgccaacagtaataggcctgtacacacgagctatgtttcagcttcggagcatgcagatagagagacaagattgggatgagcacggcgcagacagacgtaagcataaacccgggacttgaatatggcaagcggtaggcgtatataccagtctggtactttcaaacccagtactggccccagatgctctttgcctcttcgttgccatggaactggaactcgacggggatgatgtcgtcaaagccctcgtccagcgttggtgcgcggaagcggcggccgaagtcgccaaaggcgatgccgggaagggatgttcgggattcggggttctggttggaataagaatgggacaaggttagatggatattgccaatacataccagttctttgttggatgctcggacagcgttgttatgccgacataggtctggcgtcgagataaattgtacgcaacggatagggatgttgagctctttcgcgagagatgtccagtgagctcgcgtttctgggtcggcgttggtattatctagggtagtcgggttagatgtgggaaattgggaaactgagataaatgtcactacgtaccgactgccacggacttcttggcttccaaatactcgcgggcgaccttgaggcatttcggacgctgttgatcatcagcattagatttggtttcattttaggattagcttgaaaacgcaccgtcttgagaagatcttggttgactcgttcatagcctagaggctccaaatggttccagtagaaagtggactttccggcacctgggctgccacagaatattacaagctcgagtgggtgcttgcgagtaaagggtttggctgcgatgaagacctgtcaacactctaccagagttgggctggggataccaagttctttggaagaaagactgcacatacccggctcttcgagatctgactttacgaaagagatagggtcgaagcccaccgtcgccggctccgttatctgcccgaggaaaaactcctccggggtcttgaacggcataccgatgttggtagcaagtcccctagagcgagatcagactttgtcacaaaacaacggggtcatggttcttaccgatctacagctgaatgatcacctggtcttccagccgcatcaccgacgaaaaccgacgcgggcaggtcaacaccagcaacgtcgaaatcatagtcgtccaggaactcgcgccacatgccgagacggggtttccggtattcagggtctgtcgtggccgcgtagacgctgacagggaagtccagttcggtcatgacagcggtcattttttctttaaagttcgacagacttttggagtcactccgtccacccttgatatctttttggatactgatcttcttttggttggagaaaatcaccacttggaaactgtcgaagtatgagcaagtggactcataattaccgagtctgaacatacccttcagcgttgagctccttcagtcggcccgggactttggtgttccaccattgccaatcagtggcagatttggggaagacattacccgatttggttttgatcaaggtcgaatcctatatcaacgtcagtgggcctatctctcaacgctacccgttctagcgttcagttcaaccactgaccaagtcaaagccagcgattcggcgctgtttctcagcgggaggcactgtcttgcccgttgtctgctttccgatgataacactcgtgccgatgacgcgccatgtgatcggttcgggcttcttttgcgaggccggggtgaagaagtttgccgccgatttctctgtaggtcattttttagtagtagccagcatgctagtgggtagtaaagactcactggttaccgtcgagtcgaccttgcggcgcagtggtggtggagagatgccttggggggaggcgactcgcttgactgcgccctcggccattctgacagtacgggcgagtgaagacgtcgtgaaggtctatgggtaaatttagatgcgtgttggttgattcgatcagttctcgctgtgagatgcagttgaatccgagatatacgttggacgcgccgagacgcgggagaaatcacgaagtcacatgttctgaacttaaggtgagcatttaagttgtatgccaaatgtacgagatatatataacaaaaataaaaaatacatgaggacggtcatcttaaaagaagtgaacttggaatagctgatgatcccggaaaggaagaaagaatgtcaagcgctagaggaacatattttgacgtcgaatctggcaagatttatttgtaactttttttttggcttttgagataggacttgcacagattttcctgctaagccaagtcctactaggacagcagtacaggcgttgtatttctgtgggattataggattaggtatgcttctatatgcactcccaccgagaggaacgaaaatattcagtcgacttgattgctatgatgggtatatttttttccaataaaaacaagctcgagtctatcaacgccataccgtcgctggagaccgggtattcgtagtctccagcatgctcgcaaccgaaaggtggccatctacttcgcccgcgtatcaagagacaatcgatctgcctgctccaggacaaccgccgacttcaactgttcgcgcaggccaaagagatgctgcgaggcagtcttcatcgtctcctggttgctaccatcttggacaatgatataggcctgcagcacatagcttccgctcttctcgaacaaagtcatatccttcaaaggaggcagctgtcgccggggcaggttcgatccatccccacccggatagtgcagcacgcgatgcaagaagatagcaatgtcattatggatgaacatatcaccctcgaccacatactcagtagtgaaactagaaccagggttagagtccgcgatcatgagatcgattcgatgacgccactcacttataaccccacgcattcatagcctgcacgatatctccccgcggtagcgtggcgctcgacatcagacgcgacgtgaccgccgagcgggtgccagcttccgggatatcacgaaactccaacttccagggctgacgttcatagtcgtaggaagatgaagacacattaggctttgaatcgtccgtgccggccatctgggtgtctccatcgacgggggcagtggatccgaaatccgattcggaaaccggcccaaccacctgggtgtagtacatattcccgttgagcatcttgttcagccgttgcaggtccgcctgttgcaggtcctgactggctccggtgcgccccgccatacccggtttgcggtaggccttgaagatcagccgccgttctaggcaatggcggggttgcatggcagtcagcccggcaagttgctgcaggagctcatgatgttgatggactggaaccgaggcgaaaagcgactgctcgtgcattgtctgatatgtgtgtaatgtagcgggtgaagccgggagatgtccgtcagggtccaagctcctggtggcgcaacctaacgttatcaaagcgatcagactattttttatgtgttgcagctattgctaataatcatagcgtttacggggatgtttgctgtgtttgccgtgtttgccgtgtttgatctgtgatctgtgtgatttgatattccttagcagcacggagtactccgtagttcaatattggattctattgaattttccgatgcgtccatggtatgagggaatccgaattccggtgcgggcagggtccatggatgccccaaggccgccatccagtggcaatccgtgacttccttgtgcccaaggctgaaaggcaacagaaggcaaaagaaggaggagcccatggagagctcaccgagccaccgactgggaaatgaggggaagaggctcggaatctgcccccgaggccaataccgctgggatatggcgtgacctatatagtcttctccaataccccaggcccaggatgtaccgaagtagttcacccggtcccgaatcggctcctagttcttcttatcttctcgtcttttcccctctaaagctattaattctcaatatcaccttctcccatatattcagatctcgttcttaccgtcaaataactagaaactattcccttgttgggtgcctcgttgctctcggtcggattcggataccaccggacccggtcaatttcgcacattcccgcattaaattgatcttaccatcttcccacctcacactctaataactacataactgtcaaaatgcgtgccacttccatcctccgcagtgctgcccgcactcccctcattcactttattggcaagcgctccgtgccaagtacgtcaaatccttgtccgagctccaatcctgagaccaagctaacctcctcccagagtccattgaccactctcctcgtgttcaccccgcctctcccaccggctcgctccctgactctttcgccacctaccgtgctaaggctcagcagcacggtcccctcggtcgctcctccttcaacggcaccattggcggtcactccggtgcttccttgggccccgtcaagccccaggagggcgagttcttcgatcgcgccgagcttcccgcacgcttcggccgtctgccctggaccgaggccgagatcgaggccattgagaccggcggcgcgagcttgtttgcataagcgtcctctcgggcgaaataacaattgtctcaaaatgtatgaatggggcatacttccaatggaagttgcgtgacgggcgagcttgagtcttggatttggatttggggcagttgagcgcggtcacgatctgacttgggccggggcagccaataccttgataccttaccggtcgctaggacacggatctgacgcatgttcactcgttccgaggtttccgagaccagacactctcactttatactctgttccttgggtttgaagcccatctacaaggtcgtctttctctagcggtcattctttgccgctcttttctttcctttcggtgtttttgcactcgtacccggcgctggtggttgctttttctgggtgttctatttccatgcgcacatgcagctgtgtcgtcctgacgtcgaaaagcagagtcgcgttcgtcttatacataggttgtggtcaggacttggtgattcttgttacatacataggctctgtgagcactattcaaaatgtatttctcgactaagcttttcattagatgcataatactagaatatatacagccgaactatagtcttagcgtaagtatcaagggtagcaagtacgtggtctcaagcacgtgcctcccggctctacctcaattcgcccttgtagcccttgactactctcatcccgacgtctaatccaatatgggctctcatgtcagcgagacgaataggctgacattccgggagacagacgaggctggaaatcctactgcaacctatatctactcgggaggtgtcgcttcgatcacttcaacaccgacgggccgagtagatgtaatagtaagttatcatttcttgattcatattggttttctagcactggacgtttgaattgcacgcaaagttccagatatggtcgtcatcttgtggactggcgagcatcccggttgtcctggtatgcctaccaatcgctttataatgaatatgttcctggaacaacacatactctgttttgcatctatagtacatgaaatgtgctcattcaatctcgatttatggcattgattcaaaatatggatgtcactgcatgattcggaacctacaatgctatatcaatacctcaaagtcctcactgttgactaacctagtataacagagtgcctctccatcaacctcatcatggtcagctaagcctctattcagctccctgagtgatgtttttctcccttccggatatcctcaaagtgtcagcgatgactatctcccgtgagtacagcgttgagatatatgaaacatccctgatatataaacattgctaacttcagactagatatcaaatctttgtgagcatcaatccccggctgcaaactggttgtcacagacagaaccctcatggctcgaactactggctctaccatatcaagcaatatcaaagatacacctaggaaagagacctaacaccaatccaccaggactcccttcaagccttctgcagctcaatagcaggcctcctctcctccagagccgtcctccaaggtccatatcccacatccaactagaagacaagcaactaacatccaaccaaaatacaggagtcggcgtcggcaacgccaatgcctctccaacctccgccctactcctacacatcctgcaagatatatcaggccgcatcgcaacgatctgcttcgcccaccgcgtcggcacagccctcgagccggaatgcaaaacctaccgactagcagcagacgtctttaacgatatcgccatgatcctcgactgtctctcgccgggtgttcccgccggaccaccgcgagtgattgttctcagcacagcaggtgtgcttagagctctctgcggtgtagccgggggtagctcgaaggcgagcttgagtgctcattttgctaaatgggggaatctggcggagcttaatgccgtatgtgccatttcagatttctgtgcactgtcttgttaggaaattgacagacagggctaacctatattttgtcgtgtagaaagactcgtctcaggagactgtcatttctcttttcggcatgctggtaagcatccatccctaacccaaagaatctgccctaacaaacccaggtcggatccgtagtaatctcccacataaccagcttcaccacaacctggctcctcctcctcatcctgctagcccttcatctaagcatgaactacgccgccgtgcgcgccgtgcaaatgacaagtctaaaccgccagcgcgcgaacatcgtcttctccgccctcctcgactcagacagcagtctagccctagccctagatcccaatcacaatgtcgaccctacggccacaactacaccagagaagaaaaacaccctcctcacactcacaccagcacaggtcgcccagcacgagcgcatcttccaccgagacggcgcattgcagtggacgcagcatacaacaacccagcacctagggtccgcgcagataggcgtgtctatgtctacattcctgggtaattccgggtcaggtaggacattcccacgcacgctcccgctgccgcaacttgtgactgttttcgcggatgagtattatatgctgtttctcgcaccgggagggaacccgaattcgaatacgaatgtaaccaaatggcatgcttcgattctcttgaagcggggctgtgcagtcgagcaccagttgaaggcgtgggcacatgcgttactggctgcaagggttctagctcaggtcgggatttcaacggagtcttcttctgttgatgcggttcttgctgttgtggagaagacgcttggcttgttgaatgtcgatgcacgattccagggatatatgatggcgttgaggggtgtggggtgggatattggtattgcggctttggagacgagggggggacggaggattgatatttgattatttacacttacttacatcttctatttcttctatccatacccggaactttggctttcattcagccttcaacctttatcccattctacactcgatcctatcctataactacatatggtaaatgcaatgaaagccaccctccgcagtgccgaacagacatcccattaacttcgaaaggcagcggagggttacgtgtgcatctgtgctacaacactagaagccgatctgtacgtctccccgggctctcgctttcggccgacatgtctgggtgtaggtgtctgacgtgtgtgacgagaatgatcgagagaggtctagacaagacggttggtttcggagttgaggggggatactcggatgcctgctgggaggacgggtggtgtgatttgattccaaggtgtttagttaaattgaaacatgtgttcagaatggaagagtcgaagtcttggttaattgctgggtttggaattgccctgacggttggatgcatggcctatatatgtatgtgtatgtgcatatctgcatgcgaattcaacgctacggaggacagacactggagtacatgatatacttttgtatggtttcactgtttgaaaagtaatgcgaggaggggtatcaagtctattgattccgaatagaataaaatcccaattttgggagatgagagaccaagacatgtctcgaccaaaacgccgtgtgtccagaggacctgaaaagccaccaggtcctctatccaatctatagatgagagtatgatatgatatatatgggtttcttttcccgatgccaaccgccaaaaaaccatgaaaaaaagtgacaagtgaaaatgaaaatggaaagaggatgctcagccggagacatcccaaaagaaaagaaaaaaaataaagaaaacgccggtttcatatgctttcaatgcgtcatgctctcatacaccgccaatataaacgctcgacaaaggctagaatgaagtcgtgggatgatgcatttcatgcaagtgtgtaatgatgagaagagtcgttgcgaggttcgtagttgtcgtaagtccggagacaaaagggtgtgttttgggatctcgacaagagtcgggatcaaagggagaaaagagaagacaattaatcgtcaagaccaagaatcttaggatcgcgattgctaccgttgctgcctgtagtggagcgcttcttgaagccaagcttcatacccatcttcttccaagggttctcggtgcgaagcttaggactgtgcatgggaagatgcggctcgctggcaggcggtgtggtgggcggcgtcattggctcctcagcggtggggctagagctggagtcatcggtcagcgacaggtaagctgactccccgctggtgcttccaagggcgccggaggtgcgttttccgagggcatgcatggcgccgagggacatggtcgagcggttgtgacccgttgcaggaagatccttggtagacgactgcggggaggtgcgcttcgacacgcgcgaccggactgttttgatcgggtgctcgtctaggctcgtcgatgatagactcatgaagtcatcgggccccacaaagggatcggaaggacccatggagggggaagtggtgtggctgttgacgaaggggaggaagatggactcctccatcaggtcgtggatgcgcttcacggcggaatctaacgtctcgggcacgggcggcgcggtcacattcttgtactgtaggagcgcatcgcggacttcgctcgacaggttgatctcgcgcggcgacccggggaagatgtatgcagacaataggcgtttccagagcattcgcaggtgctgattctcggggcagtccgattccaaggcggcagggcccagtcgtccggccagagcgtagtaggaatcccggtagcggttggcctccatggtgaattccaatgtttcgagacagtgattctgggagaggtaggccatgaaggcgctcaaggtgtatggaggaggagcaacgttggccagcacctcgttgagcgtcgggcgcatggagaaggcccccgacgagatggctaggctgaccggccgggagccagaagattccatatcctcttcggagtcgctgtctgaggaggtgggggacaattcgggggttgcggtaggagtatggttccgaaagaagagagacggagccagcgtcttctttttaagcatagcgtagagtgtgcgtcggggacctttgatcggcttttttctcaccggtcgtcccctgcgtgtgggacgaggctccagcttgagatgaaagagggttatcgggatacaggcatataggatgcgcaacacgggatgacaggaatgtagggaacgtagggaatgaggtagagtgagtcgggtgcgtatagtttggagaggcaatataaaaggtaaataatagaaagtggaaaaagagaagcggaaatcacagcactaaagaagaagaataaaaaggtgcaaagggcggattctcgaatcattattcatgacgataccttgggtaatggtaacggggccaccctcagtagacttaagtggggcctatgggggacgctaaactagtttctgcgcccaagtgggggccggtggagtcgtctttcgataagatgtcattattatttttcttttttcttttctttttccgtttttttcctgtctatttcttcattcggtttatttcggtcttttcgcgtcgtggaatttcctgattggctctggctctgtcttattgtggcaacacactgaactctcacgtttgaacaagcgcctaagatctgcaagggagacctctgaaatgtacggaggagacaatcttctgtcgcgattgaaatcgaagcacacgatccaccgatgtattatgtaactccatgtcggtccatcactccacattccttccagaagtcatacgtgtaagcttccacgggttctggaaagcgaacgcgcccaacgtggcgactttgaattttcgttcccctgaactccaccaacacgagctctttgaagatacactccatccgacggagtaccccgtacaatgcatgtccatcttctatgccggatgaggatataactcctacatctactgcctaattgacgatagcctcttatctcccggacgctagcacgccatccgagaccggaatgtcaatcctgacccacggttctgtggtaaagaatgaccgtaccatgacgggtaaaatacacgataaggccgtgtgtcacggcattccctccttgcatcgaaggtcctcaactcttccaaggttggcgttcccgggctggcgtaaggttcccaggtctggcacgtcatctaaaccgtaattaaccgaatgtattgtatcaaatcatgtacatttaagttaacatggccctgccgatcattccaaacccggttctgagggagatcatctgtaactcacactggaatgtcacacaagctctgaactttgtctctcgatcattactagatgcatgctcggggctcgtggacgcgtatgtggaattcacagggatccggcaaggtacagatgaaagaaatagattggcttatttggtggaggcaaaagagcgacccgagcgaccgtggaataaggaataacgaataaatagcgaattcaatgccatgctcctctgctatatcgtacaatatcaaattcaactgcttaactatatccttaaccgaaataacctgactgcagccgaacctgcccagaccttctagaattctagaaaccccgtcgaagcactctagttccttcaatccactcgatcgccacatccgatattaattcattctctcagcccctgaacggactcaagttccacacccagtcacccgtagcatcagagttttctttgtagatccgggtatcgccactatcatgttctgtttgtccgagtctgcccacatagcaatatcgaatacaacatacgcattttatgcatgccaagccaggtgtaagtcaccgttgacatggagatcgttgcgacccacatcctattccttttttcccgacaatgttcggccgaaattatgggcgcataccgtgatactacggagtacggagtatggcacatcgtggtactgccgattcaaaccgagcgccaagactgggagagatctgtctatagatccactttttgtctttcactgagaacatggaggaatgtagtataaattatagcaagtacgcgagttgacatcaattgtgtcagatcagtctgcacgctctggataaggttgccgttgaatagctcaatgaagcttggttctacattaggatttgacaggtcgaaacatccatgtgtgcgtctgcatgcaggatatagaagtgttgagtttcatggattaaaccaattgggtaaagacgggtattacttgctattacttgccattgagttcatctcaggtccacactaatagggtatcattgagcttatggtcggatagcatactagtcaatattttgctttatgcaagggcacagaccgtttgaaaaaccgtcaaatggcatagaacatacaatagaacacctacagcgtgcagatatagtagtactcggtcctacattgtaatgcaatgcgaaaatcaaaaagcaaaaagcaaaagcgctggaccaacagcacgtcaaccccagtactaagtagcaccagcgacataacccagcacgccattattaccgcagccactcttcaaaaccaaccaaatcccaaacctaagcgcctagcaaagacagaccaagttagacccgactcggagcgggcctcctacgcctatatcgcagcgaaaccgcaagcccgtattgtattaagcagggactagcatacaagcgatgcacgcgagatccactcacaagaggagctcaaagccccaataatcgatcttttcttggccaagtacggaggacctaaacaggaaggaagcggatatccaccattcttccttcccccaatgttctgagagattaaggacaatacccccccacatcggtgcccacgtgattccgttacgcccttaccgtggccgcgctggccatgttcttaccttttggtttcccaaatgcgtctagaacaatggtcttgcgttagcgaggtggatcttggatttattttcttctcattgctatgtttatgttatgttatacgtatggggtgcatttccattctaatattagggcactactgtaggtgctgatggggaattattttgcagggagtgagacttttcctctttctgttctttcgtattcttcccttttttctcgtttgtgtatatatgaggtatttactccgattccttagggtaatagaggacagattgtggcatatatattccaatggcatatatctgcatatcttcaaggattatcaccggatattgtttgtatggggtaatgcctagacatggccgtttttcgtcactaaccagaaggcaggggtgttgtcgctattgactcgtgcataagctacattagtacctgcatgatccttgacgataatatctattgatcatccttggtgtcttgcctagtttgctatacccaaggatctgactattagtcgatagtaaccagttatttactcaccaagttacctttatatatttgcaattgtgtgatgcgattgtgtaacaattgatgcaatatccacggtgtacaaaatagtaaaagcgttgataagccaagctcgaactaaacacgggtcaagcaaggagagacataatcaagcaacacgccccggatctacccctgaaaccttcgacgctagcctgtaatatctctgtatggtgtgatgatgtgatgatgacaaaaaagtaccacggaccgttgagccagtcgcaaggaagaatgtcgcaaccaagaagattgccgatccgcacgggatgatctctccagaagagaagaaacacgcaaccctgttcagcagtggaccctttagctaactaaaatacaagggaaattgacccggccacccacagcagtcgatcagacggcagatgccgccgtgacctcatgtttccccactgtttcactgtaatcttgattttagccaaacaacataagttgtatgataatatagcactagattagcagaacgatcgagactctaggctcgtttcaggcccttggctagaaggtactcgcccccggcgctacgtgaaacctatgagacactctgatattgttagtgtcagggtaatttatcgttacgagggctcagactgtggggaatgcatgcgactaactcgttctagactggccttatcaccgtcggcgctaaatattggttttgctttttgggatggcttaagggttagttacgttgcttgtatgcactccggtctccggagtttacaaagtgcgtttcatactacgcgcctggtttggccaagacaccatgtgttagcccatttaagggtctatagttagattttgtggctatcgtcaaactccgtatagaatatcaggatggtgttatgggcaaggcgatcccgtacaaacattttcaatatcacacgcagggaccaatagccccaatacccatgtatattatagcataatgataacataattgaaaccctgataccataccacacacatatgtactccggatacgagagtacagagcccaaaagataaccccctgtcgataaaagcccaagcccaagctcaaactcaagctcagctccaaaccaataacagcaaacctcaccagcccagcacccaatccgcagcagaaccagcccatccccgcagaacccccctccgcctatccacgcacacccatggaccgcaaaaagcaaaaccgcaaaaaagaaaagaagacagactcctctagtttcggccacgccaagaccaaatcgccaagcggggaaggagataaatgcgggggaatacgccattagcacacaccctaagaataatgctaactaacgtcaactagttagttagttagttgactaaaaaaccccattacgcatcctgaggtaacatggcacaatatcgagtatacccactgctccgctctgactggctaccttgtccggggggattctgagctgctctgcacggcggaccgaaaacagtccagttcccgcctgagcggggttggtgtttgatctcattgctaggcgcgattgggtatggattgggatcggatcctgttggaccctgtcgatgcttctagatcttggctgggttgcgtggctggtgcatgtccgtattgcgggttgtcattggtgggctgggactgcgcctttaataacgacttctgggtttgctgtgtggtgatctttggtctgattggttctggctcatgtgtgtgagggagacgtgtgtgtccatggactggtgtgtgggcaaaggcttgcttattggatggtgcggcgtgccatgggtatactttaggttgggttgagggatgcgtacgagtttctgtttctgtgatactttccacatgatactttaaagttatgtctctgcagagtctggggatgatgatcaatgatcgacggttgttgacaacctgcaacgtacgttgtagtcgtacttcgtggtttggttggaatcatatgattatttgacacattcttgctaggctcaagatggagatgccggggattggggttgcttgcttgtcatttcccatgcacatgttctgcacggctgaatggggtaaacggctgtcgttgagacatactactttgagcatatggggagatgtcatatccccgctgtactccaccccggcgaagaaggttaccctgttgggtgatctacgtcatgccatgacatgccacggactggtgatccttgcattagcgtgtcaggtaaagctgcagaatggctacaacatacggggtagtgtggctgcacgcaatattcacatgttgtcagttggtatcagtcggaagcttgtgattgtcgatcgagtagagaagtggcgaaacgaagatgtgaacagaggaccaatagcattgaaaaggctgaatgtaaccgttggatgtacatagctactagaaggtacatacttccaatcagtcttaggctgtacctgattcgggtacagtgatatgttttctaaaactagcaagcaattgacaaggccttctaccttcactcccggctgttctggatgaatatatttatctaacccgcggtgtcaacatggtatgaccaagagggtagttagttgatttaacacacaaggctatctagtgtatgtccgtagaataatgataaactgatttcatttctataggcagtcctccaccaaaccaacaaatacaaagcaactattgagaccagaccaaagagataagaatgcaagctcctattacaagaattgtttatatacgtcgtacgaataaatggaaaagacttgtaagaacaaccaaatgaaaaaaaaagaagaatgctatcttaatgcctaccagtaacaaaaactcgcttctgaaacagagcaagaaaagagaaaaacaacaaaagacaattatagacatggacaatagatctttggaacaatcaaaagggcagagcagacggttgacaggaagagaaaaaggaaaaggggaaggggatatatgcaacatgctcttccagcttctgcacgcaataatgaagaccacgcagtggaaaggattttttccccccggatgcacaggatgagaggagataacaagaatgacaagaccatggtagacgggccggagaaaaagcacacagagagaaacgagagttgcctggtgtgcttgtccagtcgatgaacaggaatgagaccgagagataccagagacacgcccaagatcaatcgattcggattgttatctctcggaactcggttcatcctcagggcggattgtgtcattgagccatgccaattcttgtgcgggggttgaaaccattgatccaagttgtttgtctcccgagccagcgcaagaaacaaggtccgagggcggcacgccgcgagtcaatggcatcggaggatcaaccgatgagtacctgcccatttgaaagaccaatggttgatattaaacggtgcacgccggatatagtgacgagacaaggaagcgaaatcgaaaacaaaagacaaaactctcacaagttcgccgttccgagtcgtagcaccatgaaagagtgatgagacgtaacatcaatgagagaaaggttgttcctacccacagtcaaatgtataggctgaaggatcgaatgggacaaaaagagtatggccggaaggtgatttaggccgagaagcacatttcttgctcggcgaagcggcgctaaccacttgaacacaagacaagaaagagcgagaggtgaagtaaacaagaaaagaaaagaaaaaaaaagaaatcccatgcagaccttcttaggccattttctgacatgaagggcaggaagcaggtgaaagcgtggcgcggtacgtctaaatgcgccatcacttcatttggaattcaacctggatcctaagatgagctgggcgctcaagtgatgcagtacagctgaatcacctaccgcagcacagagccttcatcaacttctgcgagaaagtgggtgtcgattcaggggtacctggggcaccaaggggctgttggttactcagccccgggttccctggactcccgttgcgaccggagaggtgggcattggaattttgaaactgagcctgggttgacgcagctggagtcgatgattccacccccgcgctctggcgtttgggaggaatggcgccgccggcgcttggtcgctcgcgcgtctttccagctccaactttggctggagaaggaggcgggggctgcgcggcgtttaaacggtcggctgtcactcctggacgttggctgctgcggagctctctggcatgcgggtcgcgagcagtcgagctctggtgctggttgtggagatgtgactggtttgggtaggacttatagtcccagccccgtccgttgttgagcttcatccagtcgtactcgccatcctccacctcgccggcgttcttgagagcttgtgtcaagatatcacgcagataatcgtagtcaggggtgtcctcgaaaccaaggttacggacgtagctgaggtacttgttgaattcttctgacagagtggttagtagatggttacgggtaatagtgataataacatacctggataaccatcgcagaggtccttgattgccgtcgtttgcttcttctcgccaatcttctcgtacttctgcttgttggtagcagccttcaggccctgccagggaaggccacccctcaagaaatacatgaagacatggccaagagcttccaagtcatcacgccgagattgctcacgccccagatgcgtgttgatactcatgtaacgagcagtgccagacaaggatttacgctcgcggtaaggaatgtgttgcttggtcttgggatcacggtattgcttagccataccgaaatcaaccacgtggataacattggcagccttcgttgatggccggccaataaggaagttgtctggtttgatgtctcggtagatgaggttcttctcgtgaattgtttgaacgcgcgaaagctagtgaaagttagtcacggttcatgtagttttgatcagggaaaacgcaccatctgcttggctaccatcacaacagtctttgtggtgaagcggcggttgcaatgatcgaagagatcctccagagaaggaccgagaagatcgataacgaggatgttgtgcagaccctcttgtccgaaatagtagacattgggaatgccagctgacatgaagttagaagaccgtacaccatcttattccttaggaatacttacggcatccaaccagaatcttatatgtccggtactcatcgcggagctggggagcatcgcttttccggggttcctaattgggtcagccaggaggctcgccggccaaggggaaagggtgcgatacgaatttgatggcgacctgctggttgttcaggaggttggtgccctcgaaaatgacaccaaaggagccttcaccgatcttcttgcccacacggtagtggacacccactacgtttgacgatgaggatgccatggtttcgggagtaagaattgtcacccgcgggaataaaactttggatcacggggaatggcttcagggacgtagacacgtgattgatactatgactgggcgcagttagcacaggaagtcgggtgatgaaagcaatatcaaggtttccagtcacatacatcagtaacctctattttttttttccgaccgaagcagctctaacaggctcaatggagtctattcgtcaaatagccgatgtaccggggacggcgatgaaaggagacagggcggcagacggaatgcacgatcgggacgagaccaaagggacggagggacgtctaaagccgaaatagcccaatacaagcggaattggcagtgctgagcagtaaatgaggcgttcgtgggtccttttttgacggtcggaagtgacgagctggggttgaagccgggagaggtggtagacaagccaaagaaaaggggaaaaaaggggaaaacaaaacacagagggcacttcgacctactgcgagtacggaccgcactgagcagtggtttcaaagatataccagaggacctgagaagggagaagatggagaagaagagaaagagaaggtgcaacactctaggagagagacagggagcggagggtattgggttcgtattggtaaaagacgccctggaggggaaggggggttagtcgcaggaaccgctggtcacgagaatacagtgactgtatggtaactttggggatgggaaaccttctctgagacctatcagaggtcgtcgtcttcattgttctctataactaactagcagttacatatagactcttattaaggcttacgcttgttcgaagaaagccaccaaattgcctaactcttgaatattcccatctcgtacctaccctctcccgagtctcggcgcttccgaagcggctcaatctccagggctgcattaaccaggcaccggaaataacagggaaattatatacatagtatcggctacgacatgcattttgtctcaagaaagaagttataaccggggcagcatagacaggccgattcaagttttctcatttcaggggagagctcccgtctggaggttaatcaggcggtaatattaccgtcttggcaggaacccggcctcccagttcgtcgatcactatgatctgtgtccacgtctctagccctagatatgacatgtccactagatagcccgataaaatcacaagttcatgcaatctaatgctagtatcgttacattatagcagataccgcgataaacggctccatattgattggactagtggtcttcgggaatgtcctcggcttcgctcccaagttcattctcaaccatgtcctcatcactgtcctggccggcatcttcatcgtcctcatcgtcctcatcatcttcactgctggacccgctgccttcactatcgtcactttcggggttgtagtcttcctcctcttcctcctcttggtcttcaagctcccgctgagctttctggagctcactttcatcttcaccggctgcctccgcggcgggggcgnnnnnnnnnnnnnnnnnnnnnnnnnnnnnnnnnnnnnnnnnnnnnnnnnnnnnnnnnnnnnnnnnnnnnnnnnnnnnnnnnnnnnnnnnnnnnnnnnnnnnnnnnnnnnnnnnnnnnnnnnnnnnnnnnnnnnnnnnnnnnnnnnncccggggggggccccgccgcatcctctccgccggctttattcacattgtagaccttggcgcgccgtgcctctgcgagactagcatcttggagaccatgtcgtttgatgtaagtatcgattccggagaaattatcctggtcaatcatcgagaactcgaattcctggacgtcttcctcggagccattctccgggcgagccatgacattgagattgaatgtccgctggaggacggatgtatacgaaacagagtcaacagttgcaaatgagaagaacaggagcggtttcttgaatgcaaataagataccggtagaaagaaggaagagatagcctggcgcaagccaaagtatgttagaattatcgagataaaactagaagcacaatggcttccagtcagatggaaatatgaatgcaacataccttctttactaccgcggaatgctttgacatggtatgctttctcgcccttccggtgcgcctcaggcatggcactgacaaactgtttatcatcagggcgcacaacacgggtgtgagccatgttctcatccaaaattttgcgaataaatgcctcggccgattcaccgggaccttggccaagctgcttcccatctcctgagaatgctgccttggctggtccatcggctatcgtaaacaccatagcttcggaggtcgctgttccctcgggcgggggtgtgattccatcggcgtactcggggatgatacaaaaattgaactgtttttgtgtcttctcgggcacaggaagacagagggcatgtcctaattcgtaacagatcatgttagcaactcaaaagttttcttgaccaagtaaactcaaactcacgaattttatccatagaaacaccgaattcaatctccttcgtagcttggttccttgcccgaagatactgatgtccagcagtgacctcgagcgtaagcttcttcctctgcggcgtagagaacgaaacatcttgaacataaaaaagaagtggcgcattgccatctttcaggttgactgacgcctgcgcagtctcccccgagtctccattttgaagctttcgctttttagcggcaggccccccccccgcccggnnnnnnnnnnnnnnnnnnnnnnnnnnnnnnnnnnnnnnnnnnnnnnnnnnnnnnnnnnnnnnnnnnnnnnnnnnnnnnnnnnnnnnnnnnnnnnnnnnnnnnnnnnnnnnnnnnnnnnnnnnnnnnnnnnnnnnnnnnnnnnnnnnnnnnnnnnnnnnnnnnnnnnnnnnnnnnnnnnnnnnnnnnnnnnnnnnnnnnnnnnnnnnnnnnnnnnnnnnnnnnnnnnnnnnnnnnnnnnnnnnnnnnnnnnnnnnnnnnnnnnnnnnnnnnnnnnnnnnnnnnnnnnnnnnnnnnnnnnnnnnnnnnnnnnnnnnnnnnnnnnnnnnnnnnnnnnnnnnnnnnnnnnnnnnnnnnnnnnnnnnnnnnnnnnnnnnnnnnnnnnnnnnnnnnnnnnnnnnnnnnnnnnnnnnnnnnnnnnnnnnnnnnnnnnnnnnnnnnnnnnnnnnnnnnnnnnnnnnnnnnnnnnnnnnnnnnnnnnnnnnnnnnnnnnnnnnnnnnnnnnnnnnnnnnnnngggcgggtgggggccgcgaagggagggtggtgttggtcctggccagcaggctggaagtatatttcgcaagatcttcgaacagaggtttatgctgcggtgttgtgcctaaacgagaaaacccattggcgacggtcagcaggaggtcgacgaggttatcgaagggggacgtgggtgcgttgttggctacgcaccgatcgcatcgtagactcgctttttcagcaagggttccgtcgcaaatgcctcctcgatggcggcgatgggcgcgcccgaagaattaatggaggcgaatgccatgtctctttgcgactgctttggttcaacagaacagcagtgcagggagatgcaggttagtcggagatttgggggatgaaagcaagggtggacccgaagtatccgcattgattggaaccctaacttggggatcatgtacggagtatggatatctccatactgtatgaattcaagacacaaatccgaattaacttcatcaagaaatagatatatgagtgaatgcaaagcttcatactagaatacagtggtgtgtgtacacaatgctacaggaaaaaaactccctccgccgacttccatctccttcgcccaatcaagcagcctgcttgggctttgacttctttgtctttgttggcttctggagacgtgcgttttggagatgcttgttaatgaagtcaatagcagccggtgtcaacgccccattcccgttggcatccaacttcgccttcctcgcttccgcaatttgagcaatcttcatgttcttgacatctgtctgcggtgtcatcatagagacggtttttctgtattccttgcgatagtcctccttcatcttctctctcaggtattccggatcgtgtcgagtgcggaatctggagtatttgttgcgcagctcatcaatgacggttgtaggcatgggcgggtgctccagtgtcggtatgaatgtgctggcttcaaccgccattcgcgttgtatccatgtcgccgtcggtgatgacaggctcttcctccaacggccaagggatttcgacgtccaagccggagatatagcgagtgaatcttgggagcttgctgtgttcgggtcgctcggtgtacggcccagcagcataagcgtgctgaacaatgacgttctgcatctttccagtctgtgtgtcttccagcggaatgacatgtcgaatgtcgtccatagacacgggaaaggactgtggttgggtatcacctgcttgtcccattctgtctttggcccattcgggaatgatcacgtcggcctgattgaaaaaacatcagtgagcatttgtttaatcaagaggtcattgacttgtatggctggtccgccggagacataacataccacgttgatacccttgatgaggacagtctcactctcccggttgacctgctgaatgacattgatctttccctgatcccgtcctcggataacgcagacccggtcaccttcggcgaagaggacatgtctccgttgttcgtgcttagggagacgcggtgggtgcaaaacggaggcatcctgaccaccatatgtggtacgttgtagaccagagtctcgcatgggggcaagaggccccttttcccaatcttcccagcggttctttcgtgcttcttggaattggccagacagcgcgccgccgaagtccttccgcgcccgccgaatcccaacacggtctaacaattcctgtcgttcatgagctttgtgagtttttttgagagcctgcttccgggccgtagctgtccgctggataactctctgcatattgggtgttgtggtccagcaatggccgaacgttgtctctgcctcaagaatccccaattcgcggatcgaaaattgagggtgtccgatgagccacgtgatcttgcagttaagggtaatgtgtattatgtcagcaaccggttggcagcctgaaacattcaagtagttataccgagaccagctgtcattgattctcacaatactttattattcttattgtattgctctatatttgagaaggaaaataccccatggaaagtgacaatgaaggctgcgaacgattgacaggcctcaacaacgccaacaaatacacgaaaaagccaatgtattcctacaagcagctttccgtaacagctgactaaattcgagggccacaacccacatggaaaccacaccgaggtggatggtatctaaagatattcgggcaatctcatgattgaaggtttatatccgaggattcggggattactgatggccattagacacatagagtcatccgtgctttggaccttctaattctccgtacacgtcctttcccagcatttagtttccgaatgccgtcagaggaacgcacttgtcttcttcggacaatcaagaagcaccggcataggttatgagatacgtatcgacgccgattcaatgtggttgagactattcttggacgtcgcttcattatgaagctctaagagaccctagaagagaaataccggcgcgacatcgtagccttaggtgtgatatcacgcaaaacttaagaagccaatgagatgccgaaggcgagcccgaagataaaaacaatgcctttccgattcttgttgggcgcaagacaagtcgggtcaaaaagtacataagcaccggccacggccccggggtatcaagatgttgtgatcaacgaagtggattgaaaggtccctttcatgagcagcatttgctcatgcataaggtctgggtgtgctcaactttgcctttagtccagatttgggttgggacgaggaaggaaggaaatctgtcacaacgtcggattgtatctgagatcgatcgtgaagtcccatacaacgcccattgaaattggcacacggatccatttttggcggcaaatgaaccaacactgataaatattctaaatatgtagcttctgtcggcacgctaaagcattctcatttacctcggaagaattatgctctcctatttttgggttcccgaaaaacaacttaacggcttgtggcttgtgggcgcaagctccaggatttggcccctgtctactatttttagcctgcgcaacacgatcattggagctggcaatatatcaactccactttcaaaacagcgtcaagaatgttgtaagccatgtaaactcagaagcaagcgaaggggcagaggtttgatggtgtggtggaatatcggaaattccatggtacaattaccccaatggtttgacgacacattcaattttgggacccccctggatgcagtagcaaatgaaacaaggtttgccagcagatagcataagatcgttggaaacctccacctacaacgtagtcagtacatgccgagagctcccggggagcagatcagcaccagaagcaactgagatgcagggaactatcggagcgatcttcactggccgagtcaagcatttggtactcctgtaggcctggaggcagccgtgtaggagcactgcccgtggaagtaaatcccggtagggtgatacattatatgtgagatccgaggacgtggagctaagaaattgccgtagtagcccttcatttttttatgcggtgtatgctgctgcatatctccataaatgtaggtttttaggagatgattgaacgaatggacaaagttgggttgcttctcaagctccgaggagaagacatgagccactgaagcagtacgagtgaaatttatacgccgtagtcaatacaccataagaggactgatatcacattttgctcatatcagataccataacagccacgggtggctgtgctgcctgtggttgtaagcaacaaagcgcgaccaagtgggccgcgtgatgtggacggttggacctcagccacacatatttatggctgtgtacctattaagttcgcttttctcttttctcaacctcggaaaaggggagagcccataagccacagcatataaaaaaaggcagcctgaaactcagggggtacacttgggtgtgtgttcatagagtgttggcatgatacatagtactatgtatgtgtatgtacatgtacgagtacgccgtaaaggcaacgtactcatgtaccaatgcagaccgatattaaaagccgtacaacgtatgaagtcccgaagcagtaccattaagatagtcatcggcgcaagttgatacctcatctagaccttgacacgaagcatctccagggggaaagccacaataccgatacaccaactggcaacaacaaataccgtatactgccaccgccccccgttgtctagcctggtcttctatctttctctcctccacctccaaatcatcattccatcgtcttttttccatcgcttcccatcggaaatacctcgtccatctttctaatttccctagagctattgctgctggcactagctgatttactgcattaaatctactactccgttgcgcctttgaacactgtatgggatcacccttttccttttcccccctcctcgggagcctggcttcgccctttcttctggatcgtctgttccctgtgacgccctcgtgcctgtagaaactcttgaatcttgaaaatctaggacttgcggggctccctactccctcctgcttatttgcccctatactgacttgttccttatcaagatggccgagatccgtcgcaagctcgtcatcgtcggcgatggtgcctgcggtaagacctgtctgctcatgtgagtactgaaagtggctctctcatcgaggtcgcttccctaaccctccgcgtttactctttcgttcggccgcctgactgaagttcgcagtgttttctccaagggcactttccccgaggtaagttccccccgattcccgaaagcatgttcctttctcctaggaatatactccggagaagcataattcatgaaggatcatctgactttgtttccgtcaggtgtacgtccccacagtcttcgagaactatgtcgccgatgtcgaggttgataacaagcacgtcgagctcgctctttgggatactgctggtcaggaagattatgatcgtctccgtcctctctcatatcccgattcacatgtcatcctgatctgtttcgctgtggactcgcccgattcgctcgacaacgtgcaggagaaggtgagtgtctcatctctgatcgatcgtatatcctggagcaaatttctgggtgcgaactggaccgaatatgctgacgcactacaatagtggatctctgaggttctgcacttctgccagggtctccctattatcctcgtcggctgtaagaaggatcttcgcgaggaccgcaagactattgacgagcttgccaagacctcccagcgccccgtttcgcaagagcaggtacgttttttcaacaccaccatgaatctattataaactaatataaaactacagggtgaggaagtccgcaagaagattggcgcctacaagtaccttgagtgctcggcccgcaccaatgagggtgtccgtgaagtcttcgaggctgccactcgtgctgctctcctgaaggccgtcaagggcaagggagggcgcaagcctggcaagggctgcctgattctctaaacgaactaattgttggtatgagagcctccacgaaaaacaattggtgacgttgttctcggaaaggaggagggcttcatggcctgcatgcgaaattgtggataatatcgaatccgggcacccgagtcgtggaggtttccccccacaattcagctggtcgaccttgtgtttttcttttgcctttatttgcagaatttgtctagggaggcgttgtcttcatcataaccctgtgggcttttctttttcttttcctctcgttccgacgccgtgaattttcaaatgccaaaccgccgcgttgaggtggcaactataaacctaccgaaaagcaccgaaaaaaagatcccagaattggaacaaccgggagatgaagaggggaagccattcagtgtagcaccggttgtgcaatttggtcaacgccgtgactcgccttccctggtcgagttcccctgtgtcatagattcttgtccctgcggttatctccccatacgcgaagagcttgattcggcttttactgttttctctccctcctttactacatttgtttttatgttacagcttatgcatggtactgtctatttccatctgatatgtgtaccttgtcatgcgtactgcgtactctgcgtagcgaagtgctccgtaaagctgtaaatctttcagtgcttccgaccactagagtattgcaacaatttcgagctatgttcgaatattgttgtttcgtttattttataagggcatattgatatacctaattctgcagacgcgtaaagaaaatccatctcgactaccgattcaaactaaggagaccctcaatataacgtctagcatccataccaagcccctcaaccagcttcgacggcgccatatccgcagcacgggaagaccctgtcaagccagcggaagaagatgcaccgcctagatcacggaagaagcgagcgccactgctgacacggccatgatttgccggggagatgtagtcgctcgctttgcggacgaggaaggcttcctgaggcggaggagcaatttccgcttgggactgacttgccgagaaggagtcatccttgttggctatgaatgagagggcggtggatgaagaattggtggataacgcggttggagtttggtttgtgctgtgtgggatgcggacccagacgacccaccatccgcggtgggttttgcttgtgcgttcaagctcttgcgggcgggaccgtgtgtctgtgtatgttgataggaggcagtgatggattgctaggctttcaatgcgggaccaaggtggcagggttgatgatggggaaggggatggagaacgggctggtgagttgggtggttgggtggaggaagaggtggagtctacgctggggatgttgggaatggaggagcggatggttaggttagatgggtcatagactaggtcgtagactggctgggtttgagtggagaaccgtttattggggtccggagagctctcggacatggcaattcgagaggctgccattgttggggatgttgatgataggagcggtttccgaagaggaccgagttggtgatgcatgcttgagtatagcgatggtgacgataatgctggtgtttcaggatcaaaaaggaatgtaaacataaatggttgatgctggagtggttatattagcaagctgatttgcatggaataaggagaaaataacataccacatatatcacgacctggagctttatcggagtagtatccgatccatctgccaggtggacatggagagtcctctgtactatcagagtcttcggcttgccgttctccgagtcgggctctgggcttccctcttctaactcatccaatttttctagatcatcacggggcccaagaacgaaatatcccgaaggaccgttcctcttgctgttccgatgttttacaccggcctggggtgattgtgtagcactaacgggctgacttttcgggtttgagatgtgtgaattggattcatcttgtactggagtaggactttcaggcggcgtagatgtcgaccttggagagaaactccaagaggagccatatccaagagtgaggtatttcatgaccgtctctgttggaaaccctatatattcgccgttttgctcggtgcgaagtggtgatgcctcgtttcttgttcctgcttgattctcctcaagtggttctgggagtggctgtggtgttgctattatgagcggacgaggtatacctggcttaaaattgtgatccggcgtggacggaggggcatcttccgaaatttgccttccacgttgctttcgtggtttacggcgacgcagcgaggttgggtcccgcccaactccatacgcagaatccccaaaccgataaatgcattccatccaatgtgatatttgcgccaatgagtgccgagaaagagcaccgacaccagtaaataccacaccgtcggatggtcgagggtcattatctgccccaagccatcgagtttggtcatttgaccccgcaggcccctcgaactgtggggatggatcaccaaacctggagacaaccaagtccaccaacccgtcgatccttgtgacgaagtcttcaagtacttctctttccccgctgccccactcttcctccccgacgccgatccccaactctcctcccgcagagagtttgatgccattatagatatcgacaattgggtttccggtcaacagaagttcccaattccacgcaaacttctcccagaaacgctcaagaaacagacagaatgtggaccttccgacttgatggaggatgtcgtccaatttgaagtcatggtgcaggaggaatgccgaatgggcgcgacgtaattgctggatcagtagatgtggcggccccatctctcgcgaggaataatgaaatgtgggggggtcggatgctccagaggatcgctgggctgtatcggtgcgagttcgggtcaggtcgatatgctagcttaacatgagcctttgtgatctgtgactttatctcaaccacttacagcaacaatccaccagttcttctccagctcaagcagaacgacccgcgctttgtccgtttcaacatattctagtgtctttccagctgagaagttactgtatattaagcacgattagattggttcatttgtgggggtttgcggggatgcctacctagcaaagttgaccatgccctgcgccagacctatctggcgcaaccgctcattctcttcatcttcgaggcatttttttgcttcgccttctgatgtggagccatcgatgcgccgtgcatggctcgatttagaagtatagaacacgatctggtccgctattgtctcgtcggtaggtccgagggacgggttatagatggcaaggtaggaaagttgggctggaatcaccaactgatgatcgctttcagacatcgcatcgttggatggcgttcacgggtcgtatgtaggtcgtaccagacaggcaacaacggtaatggctgaaagactgatccgaggtgggatctggatggatggatgttgatatcacgtgccttatcgataagctactatggaagcttcaactttctcccctgatggcttctcgacttttggcaattacccactagaatcatgtggattattccaggcccagggtgcctacatctctgcaaaagacccttggtccttcgagggcttgtctttaggtcatacgctaccaagacctccgatccgctccgcattctcttttgcggctctgatgaatttagtatcgcccacttgaaagctctccatgcttatcaattgaaacagccagagcggatttcctccattgatgtcgtttgtagaccgggaaagagggttgggagaggactgaagcaaattcgggaaggttagcttcactttacgcttccttgaatgaccgtgtatcctgattcaatttccctcagttccgctcaaagcggccgcctctgctctctcccttccaatccacgagattgatacattcactggatggacggtaataccaaaactcagcccaactgatattttcgctgaccgtggtagcccccaacctccccggacggtcatataaacttggtgattgctgtgtcattcgggctttttgttccgccgcgcatattgaatggtgccaagtatgggggcttgaatgtgcacccctcgttactaccgaagtatgtgattgctatatgttcagaatctccaaataagataattgacctgattgattagcttccgtggtgctgcaccgcttcatcatacccttatcgccggcgagaccaccactggcgttacggttcagaccttgcatccaaaacattttgatcacggagtgatattatcacagacaccggctcccgggttcgacatccccaatccagatttctgcaccgtccccgagttggtggatttcgttgcaccgaaaggagcacaaatgctcgtggaaagtattgaaaagggactattcgtccctcccatcgcagatgctggggctgaaaagtccggagatttgaaacacgcgccaaaaatcaccccagaggaccgacacatcaactgggcaaactggaccttggcagatatcaacagacgtaaccgagtgattggacctctctggagtaaggccctctgtgcaagcaatcctgcggatggacctctgtcattccaacagaaacgagtcatactcacgaatatcgaagaggttgacccgcctaaaggttctgattcgttctcaattctcccaggcctgccgtttacaaatgctcctcaccccgtcgagccaaggaaatcaaggcagctatatgtttttactgccgatggcaaggttctgcgcatcaaccgaatgaaagtggaaggcgaacaagatgcagagggtctgcgagccgctataaaagctcgcatgttcggtgatcgagcattccagtatgaaggccgggagttgactcccttccgcaactctcttgtataaatatgataaagttatgtgtactatcacctatatcttaaccaatacgattccgtttcctcatttcgatcagatcccaaagccggaatctagaaggattgtcagtttcgattctactcgctgaacttgagactcataccaatttgaactgcttgaccagttatagaagcattcttagccaatgtaacaaacatgtccgcgcagtcttctacctcgggctatagcgattcattagcacacatggtcctttcaagtcggcgagactataattgcttaccgctcgcttgagggttgtcgcatttgtccagccttcgatttgatcgggcgagaagcgttgaccctgggatgttctcagtattcatcgatcctagcattgagcatgtgctacttacccattcggtgagtaacaggccggggagaatagcattgacgcgaattttcgcgccttggctcttagcaagacacttcataagatggatagctaggcgatgcagagtcagtaatcaagcagcgtggtttgttggaatgatagcatacatgctgctttcgagacagcataaggcaagctgctgccacttggcataacgccctggaaagaacccgaaaatcagcattcgatgtttctatagcagtagacagtccaaggaaatttgacaagttttggtagcttactgcaatcgaggctgtgatgaggaagacacctccttccgggttcgcattgaacgtgggcaaagctgccttgaacaggtaaagactgctctttacattgaccgaccagcactgattcaatagtcagtcaaactaaagctcccactaccgagcatgcattcggtaccttgtcccagtcttcgtcgtccatggcatcaagatcgccgaaattggtcatttttgtccatcccttctcatgtattagcatttcgtaccataagagggattgattgtataactcacggcatttgagataataatatccaagccaccgagcttctcaatcgtggttttgacggcgttgatacagtcatctttgactccggcatcctgttttcaaatgcgagataatgtcagcgggtcaaatttagagaaacagcctatttacattggatttgagtgccttacgccttgaataaccactgtttttaccccatatttgctcgcaatgtccgaggcaagcttatctgcagtctctttgctggacatatagttgatagcaacgttgcttccctcagaggcgaacttctcagccgaaagagcacctagccctctgttaaaacgagattagtttattgatcagagcatattttcatgtttcaattgaagattcctaccgggagccaccggtgatcaaaacattgcgacccgacaaggaatagggcatgatgagtaggagtttatctttgagatcaagctcgattgctttgtttcaaagcgaagagacagatagacacaagattgagatacacaaaaggttggaggagttgccgaggaatattcgatgcggggtagagccgatcaggtacatttgacattttgatatttgacgatcaacaggcggagcttcggagaatcagaaagttatattgagctggatctttcagtgcagacagccacttacatagtgactatttccccggaattttcctcggtcgggatgttgcttttatataacacattgacgtccattatttgggatttctagatctgcattcaacagtccaagatcctatcttctatgatcatcgattatagacttcttacgctacagagtctagatcccacattgcctgtcaaccgattcatttttcacctaggtgcctgatgagaacgtcatttcttatgatatctgcaactatcagatcacgataattttaaaatagaccaagccggtgtaaatacacggcacttagatcacaagccatcctgcatattgggttctcttcatcccccaccaggcccgtcgtccggcctgggcaggccattggacaagaaaacggtcggccagaggcaacagcaagacaccagaggtactaagcgagctcacacgggcccacgattcgatgtaaatagtgcgtagctttggtgccaatgcgaacgaggagactgttcgcagacccagacacaaggcagcgcatttggccaaacatagaaagaaacgaatgagttttgcgcctgcgacaacgcagactgctgtagcgggaccgtttgtaagaatcaaatcagggtagagtgagttgtattcatttgggagcctttgatccgggtgaagtccccgaagaacattgagacaagcccagaaacatcgaagcgtggagaatggcgcggtgagataggattgatggacccgtcgggcacggggcactgtgacaatagtgtagttcttgttatgggtatggccctgagaattttgtacatgttgagcctcgaaatccttggctttgtctgcgctgaagttatctccggagctcacgaggtatgtccgatacgtgtagatttgagggtcgaaattcatgcgctcgagcatgtagagcatctcagctgtgtgcccaccacttccaagtacaaccaacaggtgggtaggagatcctcttgggcgacatttggagggaatgatattctgggaaatcgtgagcgagatgagtagaaactaggagagatagacaagttagattgattcaatggtacgagtaaataatacccacgagaagaatgctagccccaagtgcaattgccaggacaaaacaccaaaggagcaggccgccgaaggataaagaagcaagagagaaggacatcttggactgctgttgtatggcctcaagagattggtaagacagcccgaggattttaatgtagcattgtcataagaatgaagccgaagaacaatagaaagagaaagagaaacaacgccaactatggcaaaaggcagtcgagcgcaagtccgcaagtgtagatctttggataaattggagtcgcggtacatttatacacgtcccccgcacgtgcaagctccgacttgttttattttcctctttggcatccggaaatttctcccttgtttacaccaacgcttttacttgtgcttctttccacgttactatgtcatggcttctctattttctaagcgtttgacatgcttttattgcggacagcggtccgctcgctctcatcacgggcctgtttgcaatttccgctgtgaacattgtgaggctgacaacttctttgacgaggtaggctcattaagaaatcttttcactggaatatactcggactatgctaatgactgtttgccaaaaagaaaggagaaattacagacccaccagctgtggtcaccaacgcctacgcgcctggcgcatcagactcacccttcgaatcgactgacttcggtggatcacagttattttgcgccaaatgtactcggaatcagcatttatttaccagctccctagcttcctacttccccccctcggacgatcccaccgatagcgaatacgaacgcgggtatgagcagttccgcagaagcctagaggaccggtacccccaggtttgcgagtcttgcgaacccattgtgaaatcccgtatcagaagagctggctacgaagcgaaatcagatcatctcaggcgcatgatggatcaaagccgagcaaaccgagaatcacgacaggcgaggaaccggagctggagaagcttgcttcttcttgcgggcgcacttgcatattgggctagtattgctggtcagatagtgtggaacttgatcagtgtagctaccctctaccaaccctcgccaagtttcgattatttacccgagaccgaacgacctccaatggcacccaattctgtgatctcgtgcgtcaaccagtctatccgttcacagcgcattcccagtgaatgttcccctgatctagcaccaactgccggtctggcattgattgcaggtgcattttcactctggtggaatccgaagctgcgcatgaagatagacggaatgcccggtaaattccgcggtcttgcagagtactatcaagctcaactcatcgtcatggtggtacgatgtgttttctgggcagtagtcaaggatccgtctgccagtgggttagaacccaaactgattcctgccttccatgccttgatgatggttttcactattctagtaagtatatttttctccttgaactttccatgcgctaactatggtagtcggttttgttctctcgatatgttgtcagctactctagtcgtccactcgtcaattggtctgataatagctgggaaactcaattcgaaagtcctaaggcgtcttcatctgtactgcctgagtcacctatgtcgactcgtatcacaagatctggcggaacaccgaaggcaaacattggtggattccagcagcgcttcccaattgataaattggcccaggcccaggctcaatctccgtcacccgtcgagcagccgcttatggttgcccccaatctgacggataatgatggcatggactggtctccatctattacccataacctccgaccgaccgtgacacggcgagatcagccgtctgtgctcgatggtcctcatccattccaggggcagatcccagcagccccgatgcctcctgcgtggaagcttcgcacccagacttcaacaaagcctatcgaacaagtgattcaacctaatcccttccaccgcagtcctatccaaccgcaaggccaatggcagcaaaagcatgctgatgccgaaccagtgttcaaggaaccgaaatttttccctcctcatgatcatgatacatctactgggctggaaacgctgtttgaccgtgccttcaatctccagcccgatgctgcgcaaggacctggctggtcccagcaaccgcggaacaagggctcgcgtgtcgatgcgacacaaaatcagctcttttatgggtgtcttcgactaggtctgctagtcagcttcattagcgcatggactatctctcagaatcaccaggtcttgattccaggaaattacgtggagatcgctgcgctaggcgtggcaagccttgttgcgggattcgctttgatcacgatggtaaaaaggcctcttgcgcaatggaatggcatggagattctgatttctatcaccgaacttggtgtcgctgttcacatgggggcccatttgcccacagtttcgcttaatcgggactacttcgatcgctacggtaaactgctccttgttttcatggccgcacaggaatctatgaatgtattgtccttctacaataaggctaaatcagaaagccggcagcactcagagtctgtatcaccacagccacagccacaatcaccgcgtcagagtcaactgggtgcccttgactggtccgcaagtcaatcttcatccaagtctacacctgaacctcgagccagcagtccgcctgtgcaccgatcattcgagtcgcagctacccgttcctccactttcttttggcgataccgaggcggcctccagtttctcttcagcattaccttccgtgccgcagtatgggcttgccgcgtctcgaaatgtccactcgttcccacctaccaaccagagcgtcttcaataaaaacagaaacccacatagtttcactatggaatctttgaagcaaatcgagcctgtgtctgattatgagcgggactcggacaccgagactatcgccaccactacaaccaccgccacaaatttcaccaaccgcaacattcggtatgggaatgaccccggtctgggttcgagtgccttttattcaccccgacggaatggtcttggatcaggcatgggcggtttaagcttggatgatgatcccactccccgccgcatgactcgcagccagacccagcgtgggttacttggtcgccgtccgaccaactacgtccgatgatttctgtttcactttacttatccttccgttcttttttgtagtcaccgtttagcttcttcggtaccactggccattctatgtccctatcattgcttgcagactcgaactcgctacggcgttgatcgattgagctagtcggttgctctctttctttctctctttctgtttctactttcggtcttccggttttgattcaagcgaatctcatgggttcatagcgcaggcgaatgtttcttttagttcgatatcgacgggtttagctgcccttcaaggtgttgggaccgctgtacatatctttcgagagggttgaactaccccggtactttgatgatgtctatgaaattacgatgacagatgtgaatactctttgaaaaaatattgattttgaatttgatcccttacgttcgttcattgaagttccacatagacttaaactaatatccctactcattcaccctctcaacatgcaccttggatggcttgtccattccagcgccaatagaagctcgctctgcatcgacattcttatgctccagcagctgcgtgacgccaaagagctcatccatcttctcaagggacaaacctacaggcacaccatagtcagcaaaagacaccattatatactatcaaaggactcgactcacccttcgtctccggaataaagaaccacacaaagacacacatcgagaagcagaagcacgagaagataagatacgttctgtacggcccaaagtcagcaaacttacaatcgaaagcacaagccaaactcacccataaccattggcaccaacagtggccagcatattcggcacagccctggcaacaacaaagttgaacaaccactgcgtagcagccccaaaagaaacattcagtgagcgcagcctggcagtcgggatctcggagacgtaaatccagcagacgggcccccatccgaattggaaaaatgctgcgaacaggaaaatgcacaccagcgcaaaatacccggccgggatgacaggtacgccctcaactggcggcgcaatgcgcacgtacagtccaatgtacatcattgccaaaccctgcgcgatcgaggtccacaggagggagcggcgtcggcctagcgagtctgccacgaatattaggaacacgccgcagctgatcatctttacgatgccgtagacgccggttgcgaagaggttggttgcgttaccggttacgccgagctgtagaggttagcatctgattgtattctcgggtttagggcttaaagataaaagtacgggctcacgttttgaactgcgactgttagctcaagaatatctcaacagtttattgggatagtagcaacatacaaatttggggagcatagtagttaatggcattagttccagtcatctgctggcaaatcatcaagacgatagagataatcgcgcgcttgcgattacccggaatgagccacatctctttcatcaagtcccagaagccggacccagcgacaagtgcgcgctcctgttctagctgggtggcaatggccgcgaactcctcttccacgtacgggtggttggagggaagattgcgcacttgggagagagtcgcacgggcttcttcccaccgatcttgtttggccaaccagcggggggactcgttgcacaacaacataccgaagaatagaagtattgcggggagaccttgcattgccagtggaacgaggtacattgcggggccctcgatattgagcagcgagccgtaattgatccagaatgcaagcatgatgcccattgtaatgaagagctggtatagacctgttagaccaccgcggattgcgcgcggtgcattctcggagacatagagtgggttgatcatggatgcggcaccgactccgaagccagtgattagtctagaggtgtggttattaacttgagataatgggtggaggactgggggcggaaatatttgtcttaccgtccgatgtacatgacttcgatgtggccgctggctgctgtttgcatgacaattccgagtatagccaccaccgctgcgccgattagggccattcgtctaccccatttctcggctaccggggaggcaaccagagccccaaagaaacaacctgcttggagcgtggatactatattggccgatagatttgctgccgcaactttggagatgttctcgaggccgtatgtcctgcagcaagacactggtcaacatagctagacactagcagtctattgagcagagataacacacttcttgaatcctggcatagttagaactccgccaataataccggagtccatgccaaaaagcattccgccgaaacaggcctgggaagcattagctctataatcctagaattattgtcattgcgatcgctaaggagagactgaccgaacatgcaagcataaagaccctccacccatagatctctttagggtcttctttcatcgcctcattgtgaacaatcttttttagaaaccatgacatcttggatagaagcaaaaggaggcaagtcaagatgatcgcagtgaatccgaggggagtagctagcttaaaagtaattctctgagactagctcatgacaaagctaaactttagatgccgtcgacttttgatatgcatataaaagaagagaagagactatgaccacaagcctatgggaggtgtaattctaagcccagttgtcttggccggccaccgagcggcctacggaacaaaagcagccccccgaaataaggcgagcagacatgaatgaaaacttccacgaatccgaagcctggcacgggctgcagaaagctactacagctcacatggctagggtgtttgggggttgatccgaacatgattcacgtgctttcagataggagtgcagttccagggtagtactttgtatgtgctgatttatcggcgatattccgagcctgaaaaattacaggaggatagatagctttagccgagaaagagagaggagaaacttcgaaggcttgaagttgtcggctgttgatcttaccccggactgcggggaaactcaaaatttaaggctaatcccaatgcggcaaaacaatccagaataggatgagaccttgaaaccagaaaccagactgattcattgcacgatatcagattgtaatgtctgataggaatcaacttccttctgcactttccatcctcttccgtaaccactcaggaataactggcttcttctcccaagctgccttccaatcacgttgacggtctggcacagcataaacagctgagacgaaccagcaatcctggccagctgccaagcccactgcaagtgacggcaaaagcgtacgtccgtgaatgatattagagttgggatcagccaagacgatccgaccaacgcgcccaatagccgaatggagctcggcgatgccaacagccccagccgacgaaaccacaagtccactccggctgtcatgaatcgtaccctctgagtcattttcagtcataggtcccaaggtacgaccattatcgctgcgacatccgtaaatagcaaaggcaccttcggaggtctgcagagcgcgaccggtgcgcacatgatgagcgcgcagatgccaattctcggtttccgccgttggtggaattagtatagtctctatatcaacatctggccacggtttccaaccagaaacaagaattggctgaccattgggctcgggttcctcgaaacgcgcatcaagcgctagccgtctagtctgccaaatatcgccgccgtcgtctgataaggcaagcatgctgtctggggcgtgctgttctagctggtagccacccgttggaaccgagtatccaaaggcagaactgtacgcaaacttgccatacttggcctgtgtcgctttgagggggtagtggcatgcttgaccagatgataacaggaacgagtgtcccccacgacggatggcaatatgtttggggtattttagggcgaccacttcaggcaaagaggaatttgggtagggctcctcttgcgcggaccagaaggggtgtgtctcaggtagtgccagtggagtgaacgagagacagcaccagtacggtgacccgggagaattgtaattctccgttaggtacatgttagcataagagtagccgagactcaaagtgccatcattgtgaaaaatgtcatcctgcgtagaccaccaccggaagtggcgaagtatgattccccttaccacgccccatgtcaatggttccggtagttcgacatccgcgaagcctaatgcaccccaaaatccaaccatggcaaatcgataggtcatagagcgtccgaacgggatggcactgcctatttgcttgtacgtctagtcaggacaaagtcgcatctcagaagaagggatcagaaagacctgcccaagacgtaccgttaggatcgaagtagtgcacaaaatctgtagcatactcccgtgcccgctgacgatagcgttcagcacgctcaggatcgaagtcacccgccagcttggaataaagaagctgcaagaactgaatggcgaatgagcccgagtagtagtccatctgatgatgactcttaggtccatcgttgctccatccccctccaacatggaaggtatccaaatggtccatatcagcctcaatgcgagacgaagagtattcggcgccattttttctgaggcccaagtttgcaaagacgcggaaccatagcctacagccgtcccaaccgtaattagccgacttattcagtccacaccaaggaaagaccctactgggcaaatcgagacataacataccagttcgtatttggcatctcgcgcgcattaatactcgccaaccatctaccaacattccccctctgcttcgccgtcaatggatcccaaaagacatgaggcgcaacagcaagcgcaaacccaatcggacacatctccaccatgcgctgatccatatcctcgatatggccccagaactccgggtgttcgggatcagtcccgttgatgattccctggcgccagcgctcggcctcgccgtattcatatccgccgcccaacagcgaggccaggccccatagcggacgtgcgtatccctcgatctgggcgccgccttcgtcgaatcgtgtcgtcgatgtgcctactttgacgcgtgtacctcctggtgtaaagaggggtactagcgggttgagaatggcgcgacatgcttcttgtaggtcggatctagtgcggaagggggatttgctgaaggcctgtgagggggttcggccgttagcgtggatagacatcgtaagtctgtaggcctggaggctgtggggaatttgtgttgttatggtagctattattcgtttgatatgttattataggttttatagagattgacatcgggttaatcgccgattattagctgcttaatagatacttcatatcggggttcgggtgaatatgccgacatatagtaacaccctggacctgaggccatcttggtacaaatcggaattcgctgagaatgccgatccagccagttggatctgtgcgtagttttgaaggatcctggggttagcggggggtttggattcagccggtcgacgtaatgtgtggagatcatcagtaataagaggccagtttgttcgaaataggctgatgagaatctgataagcgggggaactatcgtccaccaataaggaaacaggctaagcaaccaatagtgtggctcttgtcatataggaggatatcacatggtattattgtttgtacatagggctcaacagcactcaatatctatacacgtctcaaattgcatgacaacaatgcaattggacatctaaccacccaataggccccccaagaatcggcccagctctttcacaagagcatcatcgactccctcggtctcaccaagaccctgttttaggatctcggtccaccgggccagggtaatctcgtgcagtttctgtccgttcaatgcggaatggacacggctggcttgatcggatgcgatggagtcgtcagatgagacagatatgtggctttcgacaatagcgccatgctgcagacggaggaatgcacgagtactaaagggaagtgaggagggaagtggcgggcgttcacgaggatcttcctcgatcgggtatgttgagaaagtgaaccgcggtgtttgtgtgtacttccactccaacgaccgcaactcggcaattcctttcccaatggtaggcacttgctccccttgtacatctcccactgtaccagcaacccaagagtccccagcgaagacttcaggttcattggcatgagcacgccgtgccctgagaacagcatccggatgtacctcgtagagccgagcaaactgctcgatcacaccctgaaccacgccctgcatcgaaaagaacgagtcggccaacgcagacgagacattcccgactggagaacgaacgctttcaacacccttagcctggatatacgggcgggcggatgatcgcaggtaccggccaagatcatgaatgttcggggaatcgagcaagcaagtgccatgatggagggctcggtgtcgagtaagcttaaacgcagatccagagatcttgcgtgtcagaggctcgttgggatcattttccaatccctctgctcgggccatgacaatatcatgccgttcattgacactagtgttggtagccccgacctgatgaagtgcgcgcaccaccatctcggcatgcttgtcgcgcgtaaacgaggtccgcgggcatataacgctgtaattcaggttgccttcatcgtgaaatacagccccgccacctgatcgccgacgcacaaatactgcagcttcgtcttctccggtcgtgccgttccggtcattatgaagtgctcggagatctgtctcaagccatgggttctggttgcgaccaatgactacacatggtcgattggcatatagaaataaaaccgtggactctgtcggggcgttttctagtaggaagtgctcgatcgaaaggttcacgtagggatctgttgatagcgattggtagatctggtgtaaagaggaagggcggctggcgagctcggcgaattggtgagcgggatatgacgaattatggcggatccagccatattttagcggattagtccaaggtgccgaagacgaggaacatcctcggagggcgagcattggggcaaagtggaagaggttatgagcgcatcacgaaagttatgggccgatagtcggttgcgctagtcccagataggaatctcagcgatgagtcgaattcaatttcctttttttctacttgcggtcagccatcaccactgttcttctttcttattctgcagtttttattgatctcaaggtctttgaacgtgtaaattatcttcaatcccttgcgactatctttgaacgcccatcatgtcgacgtggggtcaatatttccgtgtcaccacgtaggttacccacccctcacaaaacacattgttactgacacccacaattcagttatggcgagtcgcactgtcgctctgtcggctgcatcgtcgatggatgtcctccgggattggaactcaccgaggccgacattcagccccaaatgacccggcgccgtcctggccaaagcgctctcactaccccgcgggatgagaaggaccgagtcgagatccagtcaggcacagagttcggtatcactcttggtacaccaattgccatggtcgtccgcaatgaggaccagcgccccaaggactacggcggcagcacaatggacctgtaccctcgccctagccatgccgacttcacctaccttgagaagtacggcgtcaaggccagcagcggtggtggtcgcagcagtgcccgtgagaccattggtacgtcatgtgtaactatcaacgccagaagcgattactcttgctaatccaattcccacaggccgtgtcgctgccggcgccatcgccgagaaattcctcagcctggcccataacatcgagatcgtcgccttcgtatcctccgtcggcaacgagcacctcttccccccaacccccgagcacccctccccctccacgaacccagagttccttaagctgattgagacgattgaccgcaaaaccgtcgacaccttctcgcccatccgatgcccggaaaccgaggctgctgcgcgcatgaccaaagtcatcgagaagttccgcgacaaccacgacagcatcggtggaaccgtaacatgcgtgatccgcaacgtgcctgtgggactaggtgagccctgcttcgataagcttgaagccaagctcggccacgcgatgctcagcatccccgcaaccaagggcttcgagatcggctccggcttcggtggctgcgaggtccccggctcaatccacaacgaccccttcgtcgtcaacacgtctgaaaccggcagccctcgcctcaccaccaagactaacaactctggcggtatccagggtggtatctccaacggcgcgtccatctacttccgcgtcgcgttcaagcccgctgctactatcggccaggcgcagaccactacttcttacagcggtgaagagggtgtcctggaggcgaagggtcgtcatgatccttgtgttaccccccgtgctgtccctattgtcgaggctatgtcgtcgctggttatcatggacgcactcatggctcagtatgcccgcgagggcgccaagaacttgcttccccagaaggctcagactattcgtactagtcctactaccgcgcccaatggtgctccttcgttgtagacgggaggaaacctgacaatttattaaaatgttatacgcaagcgtcattaagaagggtcacgtctatgtctatatacgtatttgatgtatcatggagctacaaaagtgttatatagatgccatattcatacatttaccaatttcgggaaaatctacaaaattgtctaaactatagttattactcttaaagcctcaagaagcctcaaagcaagacatcaattttgaatttgccacctaatctaacaagcgctcactcggaaccgaagaatcacgaaaaaaagggaacacatggattcatcagaaaaatcattcttatctcagaacggcatcaaaacatcgctgtggatatcgaaacgacagaaaacagcagccacccacggaaagcagtgtgacaaaagtaaagactccaagcgagaaaaccacaaacgcacgctaaagttgtgtacaaacgacacaatgcaatgtaacacagcacacctctaggtgtctctcatagatgcagacaccaaaccaagctcacctaaccaaaaaaaaggacacaaaacaacaagtgagaagataaaaccaaaaaaagagaacaagaaaatcaggagaagaggaaagatgccagatctcagatctaggtactaactctccggttccctgtgctccaactaacagagcgctcagacatactatcaacatcgccagcagtagcattaacgacacgaagtttctctcgaggaaccgtgaaagttatctggactcgtcggccctcagcggcaccctctaggtcccaatcatgtacatcttcctcatcatcgccgaagccagcttcgttgcccagatatcctggcgcgccgatgaaaagatcatcgcgtgtagaccgagcagtgttaaacacatcgtctgagactcgtttacccgcattccagtctttggcgccctgcttacggcggaataactctgctgaagcgctgactgctcggcgcggggagctagggcccgagcatgtggattgttggtcagacccgagtagcgtgctgcggcggtcaatgccggaggcccggtgcgctgtgctagtggtactagcaccggagtctagctggctgtcggggctgcggcgggtcattgtcagggctcggcgcatggtgttaattacccagtcggcaggtttaggttttgattctcggggcagttttgaaggggatgagggtggtgagggtgatgagggtgtggtggggtcgaaggcatcaaagaggagggactcgttctccgactggcgatgggacatgtttgtcctggctgtagagtaggaatccgccgaaacagagttttccgagggggctacgccgtctggatcgctgtgtactgagcctgcggcgaggtattccagtgactggtgtccactgccccagctcagaggtcgatcgacaaggatagctcgtgcttgattgaccttgcctacaggttgggtggatgcaaaggagaatgtcgaggtttctgacagattggtggctgtttgttcgctttttgtcggggacacgggatccacagatccaatatcctttcgccggctgtagaaaggacctaggccaacgccgaagatggtgctccgaggagttgcgtagggggtgtctgagaagggatcttcgggctccgtcgtcttgaccgtgggtcttgtttcagctggagtgcttgccatgagatgttctcgtaggatctcttcatcttcctcgcgttcatcaatagggtggatatcaccagtagcatcactccaccggtattcgctgtttcgatatgagaatggcctattgctcactggaggtatcatgggggatcggttatttttggctagactgggagggtccaccaacagcccagtcctctccgccatgccttcgccctggactttccagttgggttgtgtcgtctggcagcggtttgccgaccaaggatacacgagggcatcccttgtttggctcattcctgagccccgaatactgcttgcttgtgttggacaatctcgaccccaaaagtgagatcgttcggcccccaaagcaagttcccgtagctgcgagtctcgctggctctttccacggcgctttcggtgatagttccatccacataaaacaatggctatagcaacagggcatccaatgcccagtccaacccccaagccggccttttgggacgatgaaagcttaccagaatgggggaaagcattcgaggaactggctgcagggttgctgtaagaagtaacccaactgctcgaagtcacattgtagagatagatctgcgggttggactgtgtagtcggtaatgcccgtttcgaagacgatttcgggatagtgtagcccccagaaatcatcatcacacccccagggagcattgccgctccatgtccgaagatgccagtaccctcggtgattcctaagccttcggaagagggtgctgtccaaatccattcagtggttccaccaaacccttccgcaagatccagaactgcaaactgcggctcagcagggacagtaatatcgcccacccaacctccaaacacaaacactttatttccatcttctgagagaactgctgtgtgaccggaacgaggctcgatagaaaccgtatcccgaacagtcagctcagtctttggcgtcaaattcgagaccgcagaaacaaagctccagctttgctgcggcagcgagaaaatggcgagttgcgacatgttgaggaacgcctgcctagtatgaccaccaataaacaagaaatcctgttgtttccccgtagaaccggcagcatatgtaggctgaagcggcacgacggccattccggcttcagcgatgggcggtgcgcgcttgccagtagtggcagcggtgaacttggtgttgtagtagggactcggccctaacacgaccgtcgagtgcgaatagttggctgcggagacccatgtttcgtccgtgctgttggcgaatggacacatcccaccaaaagcgtacatggagctctcgtcctcgttccgggatgccgaatacgtaaaccccgccgccagatagttcggagcggtttttgcgtcgctggtgataactggtagtttttgccaagtcccattgccgactgggctattgctgtttgggtggaactcccatagtatcggcttatcggatgcgctgtggcagttgcccgagtagactgtgatgaacccttggtcattgatggtggaaatgaaactcgagttctggtcagaactgtagaacggcgtgctcttcagcaaagtttgataggataaattctcggcgtcgatactgctggacaggttgagggagacgaactcggttccgccggtggagctaggtcggaggatgtacgcgagggagtcattgtgttgtggggaaaggaagatagaggacggagtgtatgggattgcagtagagggaccaccgagtgcaagaagcgcaagcagtccctttgccttccgatgcttcatgctgcttgcgatccgagacaatcagaagcagggatacattccaagatcggcgagcatgacatgccacgcgaagaagagtgtctatttttggacagtgcaatgcagatattaaatttgacaggtgtcaacgtggtcaacgtgaacggtaatgaaaaggtagaaaggtaaggagatattggaggggtaacattgtcttcagtaaacaagtttatcatcagacctgggtctcgcctgttctctatattagaccaatcatcaatcacccaagagtaccaagagtcacattcatttactcggctttgtttgcttgcactaaacaaggaaagagggaacctaaagtgttgccgcgagtcagatcgacggattgacttcgttgctgggcaacggcgaggtgattgcgtgtttcctcatgttttcaggtaaactcaagagcatctcctacatatgcagctatgcacaccaggcagtagcattaaatgtaatctaattaacttggcttgatttttctcaatattagaatccttcgacgttattcaaatctccaagtggcctttagtaaagccggtatatgtttcagactacatcaattcaatcgatctattaccagatacggggtttcgcaccttttaccttttacattttaaggtcgttcatcacggaacatcccgaggctatgtacgatctacacatgtatgcttaagttgtatgtagacatgcatattgccaagattaggagcggagcgcgctaaatccttgcctattcccattctagaaaaggatgggcaacaggaagagagctagaagattcttggaagaaatagcttgagacgttctagatatgatatatttcttgggcatggagactaaacatgaattaaatgtgaaaactcgctcaaaagttaagtaagaagccccaatttcaccattgaagcggttataaacgaatgtataagtggaatagacatgtcttcctcgtaatccttaacgtttcaagttgatttcatttctttttaccgcatagctaaagggtagctgagactagcaacttgcaagccgcagcgaattcctgcgatgataaaatcaccttattcctcaggctggtcaagatgatggacagcatgacctcctttccggcctgcttctttggctctctcgcttcctggctcgaattttccacgcgaagcatgaccgcctttcgaggcaatgttcctcttcagagtcgtcagtttgctgtatatggaataagacactgcttttactaacctgcttctccttatccatatgggcaaatccgccgtggtggctagactgtccaccctttcgagcaatctgctcgacctcttcgtgaggacggttgtggaaattaccggggttggggttgtcgaccattgtgaatatgtacaatatgtacagagtagtattatgattgtaaatagtttggaatgttgaaatgcgtgatccgatgccaaattagctacgtatttatacacaactccatatatgtaacgccacggggtggctgttgacagatgcgatggagtcactttgacgtctattcagccccgacttttctatatttgcctccactgagaacttgccatggcctcacaacgatccattcaggggagttttaaggaatattatcaacatcatcagaggagaatgtcaatgccaatttctattacatcgtgttatgggcccaagagcaagccatagcttcgtgttgaagaaaaccgcatcactatcttgtagatatgtttagttctcgaagagttcgaagatcgaagttctatagtaaacaatcctatatatccttagacaacaagataagcacatatgattacatattccatataattaggacctgagtcaaaagctcaatatgtccaaacccatggtagataaacacatggcatatgacctcaaacatagatagtggcaaccttgatgaacttcgggggacatcgtgtgattgcctagactcaaagcctaatgttgtctacgtcgatattcgtcacgtcgccgtaattgtgtcttttgacccaattcgtggatccccgcctcaatccaaactaatacaccaaccttaacatataacttatacgataatgaaaaccaattaacagcatttcatatacaatgtccgggaaagaggtccattgaacgtatacagccggcaaggctcatactagcgaatttatttcgtagagggattaggcatccccgaagtatcaggccacttacggaagaggtccgccagatgatccatcggcgccgttagaagccccacaactgtctcgtacggaggcctgtctggtgcgctaggatgagaacgcgaagggacgaacatcttcgttcgtccaaagctcttagaaaggccctcactctcctcttgagacaatgcatcctccagtttaggcaaatcttcagtctcctcctctttgatatgttcagcaaggtcctccatcagctccctgacagcaggaacaaactgcgtatttgaaggtgtcatgttttggaacgccttcaattgcgttttaaccttgacccatcacgtcacatcagcactctgataggtaggtggcagaggagcttaacttactttctgatgctggtcacggtccttattggccatttccatgccaccggggagaagtttctcgaagagagggtaaacaacaagctcttctccaatggagtgtcgagctagttcccaggtgaacagattctggaaacgagtttgttcatcctcgtccttggaggtgattatcttgccatagtacgattcaatatcccggtgatcttttttgatcgtgtcgatgatacggggtgtcatggtagtaggagttgcaatcccacgtctctgggcaagacgtgataggagttgactgaaagtaggggttcttggtgcacaaagagcaaaagtcattgtggccttggaaggggagattcacgacagcaatctcaagttctcgacaagctggaacgtggactccttataccagatgtaaatttaggcacaggcaaatacagtgcaagtcttcatttgtctatctgcccgctagatcatactgacgtgaagtaaatgcatgtagtatagtaatggaagatatggtatttgctgcgatcctattcaagcctagacaaacccgaaagtggtaaattgatcttacgtctaatgggtgtcatgagtgtcatgtcacatttatataatcctcaaagctcacctgtgtacctaggcgcatgatcttggatatttatgatatcacatgtgattcgggcagtttctttgcgggaaaactatccgtcatctttgaatcatcaatgggctcttgtacgcaggtgcgaataagcgcctcgcagttagtgctttagactgaaaggaaagttttccgtcatccgcaccgtggtcatgtacccaatcaggaccatgtttcacagtgtacggtgctctgatccttttacaaaccacactacagttaactgttggcatggtagtttatgtctagttcgtctatattctgcctgttgggacaagttagcgttcagcttctagcaataggtactcacgagttgacatattcctagcagccctaagcaccctcttcaaccagcgatatccaaattgggcaagtcgcagctgcggcctaaaatccggtgcatacagctatatatgtagtgtcttcatgtgaaaaagaagcaaagtctcggaccgcaacaccccaacacggttctgtggattccccggcttacatccaatgttagcataacaaccgagctaacatttgactttcttgtatagctagttcgcatatgtgaaaatgggttgtctggatagtcttattgagagaactagaaaaggagtagacacatgtctaactatgaacagaatgtccattataagcgtggagtatgtcctgcaatcccaatggagctagcggtgtaaataactatctcgcttattaaaggcaactatacgagacccatgcatggaagaatgctcgagcggcggctaccatcgtcagccaccggcgttcggggacgttggtctcatggctacgagaagcgaaggggaaagcaagtatcggtggaaaaactagtcggcttcagccagtcgatctttacggataaatgagattggacaggtagttcatccatgctcggcaacaagaggcaaatattcgatactgcacattgccttgatgtggactataaatggggttccaagacaaagtcgccacctgtggacttgtatacaatcacatgtggaatgcaagaggctagaggtatcgacaaggttattctaatttatgatcaagtactaaacacctttgatgctcaccccaaatcaaaaccattacgggatagagatcaacagaggatgacaatctaaatcaaaccatattgcaccgtgcctgtgcataaacaccgtgcaatatagcgctagcccaccggtgtctaatttccggtgctccgctctgttaaattgtaaatccgactcgacgttaacacagagtaataaggcaccagggtgtgcacacgcccagtcgactgggactcaatcagagagggagaacaaaaagccaccttgcccctttcgtcacacagcaggatcaacacgagcaatttccctcaataagcatcagcgaagcccgaaatggatgagggatatagaattgggaatagtgttgtgcttcccgtgagctttggccatgctcgtcttcgtgtgctttgatcgcttttgcggtgtaggtggcgctcggggactgtgggtgctgtaggtacatgcatcgtggagaaagcagagtgatgttttgaacctggatgtggaatggcatgaaatgaagacgggatatgcagaataaagattattattttgttgaaacggtcaaggtgtcgccaaccacccggacaattgcctcacactccaacctctaggtcctttctaggattagcttggtttggaatcgcatgcatcggcgccggaaatggctgcagaacgtgttgtctcggatattcaggccgaacttccattgcgcggggcaaactgtacaaccatggtaggaatgattggtaattcttgcacgctctacccctgtgctataggatgacgagtatcgctcagaatgcggaatataacgattgatcagccttcttcccgctctacatgcgacagcgagggcatctgccccaatccactcggctacatctcctgagaaacgggctcatatactagttcgagggaataggtagactattgaaccccgcgattatatgtctaccgtagtttagccctcgatcgagtgatcccccgcatcgtaagttgtggggcatagcgtcttatctggagtctggtccctgggcatctctggttccccggagagttctaatggcatgtcatgaccttggaatgcagataatgtaagtcggcaaattaccgatcgtacttcagggttacacgcaagaaaataaatcaaggacataggccaagacgatacaagagaaagaaggctaattaggggccagacccctatatgacgtcgagtatacggagtcgcgcacagataattttatgcacggacagcggatttcatgaggatttcctcccggaaagagcttcatgcaggacgcctcccggagcctgggagtattctgtagtatcatagtaatatatagtgttacagtatactatatggcatataagcttataacatccctataacatgccatatatatgtacaacaagtcggagtgtacaaagtacatccaagaaagagtagagttccatccatggatacacttttgccttttcttcaattgactgggacgacataaaacggcaaaagacgtccttgatacaaccccttataatacagcttccggtattagggcccagcagttcgggcagaagttatgagcgaatctacgattggaggtaaaatgatctatagccagcaccggagtaagatagtctgtctgtaaagatgcaggcctcggagccgagggagtcgagttggaataataaaaataaggatcatcacacggttgggcgaccatggtcggtcatttacctacttggcattctcacgatggcttccagtctaggctctttgcctacatactcgctgaaaactgtcatggtccatgggaattaggctgtccacggaagagtcctcgacgtaaggacccaagcccagtggcaaatccgccactgggaacaactacatttacaggatataatctgtatattctatattctatattctgtctataagatatgtattatagatgcacggaatagtaggagtaccagattaatctgcaaacagcgcggaattccagagctgatagccccactagatatggctaaatcctgaaatctgatatattcaatccccccaagtagatcaattggcagttcgagcgtatccctttttcctttttcacacttattttttataatccgccattcggttcaccattgacttggtaaacttatcttgtttcttggcatcccgatcatcgctctaccctattacccaacctcccccttcaactcttcaactctcccctcgactctcggtctctctacacatctttttctcttctctttctttttttgtaattcttacagctgcttggctgtcttgcctttcctttccacattactttcggatctcttattcttgattgattccgatctcgctccccccacctccacatcccccgagaactggccatccgaatgagccaaaccccgaattatttatagcatctgttgtcaacggcactccttttttttgactcatttccccacgtgtggatgtgggatcgtccataccctcgtgcagtagcaggtctacctcgtgtccttcccccctaaggcgacaacccgctgtccggtacacggtttccgttgccttgtcgccatccctatcgacttcacgaaagtaatgccgacctgtttgtgcgtgcaaacagagctttttgtcagctcaccttgaatcaattattcacgagggaaacccccgcaaaaaaaaaaaagagtcgaattggagaatgttcaattaggatgcacaactgcactcggcacagctgcctcagccccctccctttgaaataataccacacaggaaggaagaagggaatatgacagaaaatagatcctcgcaagctggtctggaggatccagatcagctggctcggaatcatgtctcaaaaaatcacaagcgagatctcagccggtccgacgagtcatcgcaactcccatctgcgtcgaacgaccaactcgagtatcgcccccaatccaaatcatccgcggaacaaccatctatcatcaccgatgtctcggaagctaccgcaactttccgccaggccttccccggcgttggtggtgctcgggccccctcgaatcgctcgtcgtcgagttccctacaagccctcaacgaaggtatcgtggtcgatgtccgatcggaaaatggaagcattggaaggagcactcgacgagcctcgagacactcggataatcaattaccagtttaccccgatcaatcctatgcctccctccagtctcaggtgcatcccacctaccaccctcacctcgccgaaccagatccgctacccagacactcctatgcccgtggtgttcgtactgcgggcaacactccgatatcgagccccgggctcttctccatgagacactctcgcatgggaacgccatccgcgtcggacgatgacgtctcgacgcgaagctcacttctccatccgtcacatcttcaaccaccgaaggaaacacacaccgccgaagttgatcgcgacataatcacgggaaacaaaaccatcaatcagtatgaaatccttgaagagctcggacgtggtgaacatggcaaagtgaaactaggccagcatattgcgactaagcagaaagttgccatcaagattgtccagcggtactccacccgccgtcggttaggcaaattgggcaacccagaagacaaagtgaagagggaagtggctattctgaagaaggcgcggcatccaaacgtggtcagcctgctcgaagtcatcgacgatccgaaccgacaaaaggtgtacattgtgctggagtacgttgagaatggcgagattgtctggcgcaaaaagggtctacgagaaattgtccacgtcgacaagctacgtcttgagcgggaaaagaatggaattccagacactcccgcttttttggaagagagccaccaattcattcgaacggctcagcatctgcggcggcaacgggaaagggctcgcgaacgcattgaagcacaggctgccgatgcccagcaagggccaatccctgcttggagtttggagcacggtgcggagtcttcagatgaggaggatgacgagtctggtattcccatgaggagaccatctgttgcagtaacagatgactcaagcccatccttcacgcaggacccgtctctaagtgctatcgagggcagcatgtacggcgcatattcagacttcccgatcgaacgacgttccagcacagcctctagtagctttggttatgcaccatctgaacccgagtggtctgcagagggcgatgacatggcattcgttccttgtttgactatcgatgaagcccgcagcgcattccgggactcggtacttggcttagaatatctccactaccaaggtatcatccaccgggatatcaagccggcgaatttactcgtcaccagcactcatcgggtgaagatttctgatttcggtgtttcctacctgggacgcccaatgcgggacgaggaagaagagcaagtgggcgagaccgacgcaacggagttggacgatgcgcgtgaattgtccaagactgttggtactccagccttctatgcccccgaactatgttataccggcgatgatttcgtggagactattgggtcgatccccaagatcactggtgccgtcgacgtttggtcgctcggtgttacattatatggaatgatctttggtcgcctacctttcgtttcggatgatgggtacagcatgttccagaccatcgttaagaaggaagtcttcattccgcggaagcgccttgtgcccgtgatggatgaagcgtccgactctaatcagtggaatctgagaaatgatgatgagctcgtctatgaggatatcgacgatgagctatacgatctgctcatgcgtcttttaaccaaagatccgatcaaaagaatcaccctgaaagagatcaaacaccacccctggacactccacggtcttcccaaccctcgagtctggattgaggagaccgaccctgccttccaaagtaagggtaagcgcattgaggtttcgaatgaagaagtcacaagcgctgtcagcaaagtccctttcattcaacgtgttcgatctaatgtcgccaaatggttcggcagcagccgatcgaaggacaaggaattccgcaagcgcacatcgagcacaacaccgtctaccgagaccctgtcctctgcctcaagtaacagcacatttggaaaaacctcccgcgacagtcatcgcttcagtttgcgaggggacgaggaattcttccggccactcaaatttggcagtcaaggacatccgcttgcccagagcgttactgcaagcccggtggatgaaggtgattgggcatcttattttgacggcgagcaaccagctgcagcaaatcttgctgctgcgactaagcttgccactccacctccacgccgacctggtcctcctcgtcgcgcacggtcttcaatgtccacagcagaatccgcaaagacggtcaagccatccagtttcgatactccattgacggttcggccgttttctatcatcgaagccctaggtcctaccaacttgggtagtctttttagtggagctactcgacgggcatcacgaggcagtcatagtcggcgcagttctccgtctggcgagtcggcatctcgacatggggatagagaacgtcgctctgctgagcctagcatcgctgtcagcaatgcatctgcccatggccaagtgcgcacccccggcctgtggcatgaggagaaacactcttctgcccagcaattaacacacaggcgcaagcgatcttcgaagatcgaggatccatcagctgcagaatctctcaatctcacaaggaatgcactcctgcgtcgtagacggagcgatattgatgcaaatgaaggcggtactctaagagttgactacgcgatgtactctactgaatcgctccttctaccacctatcactccagctaccaaccaagggtgtgccgccgacactaacaacgggctggccacttccacctcggccactgtatcttcctcttctgccgacgacttcaccagcggcatgtctcagagtgcctcccaccccagcattccgtcggtcgtctcaaacgcatcgtctctttccggtgacggttactcggtcaagggaaatgacttggacgaagtaccctctatgctccgaaccggggagacactcaaaccccttcgtactcatccgaactcgcccaggtcgtccgaagaggatgagtcgaggtactactgcgatgacgaggacgaggatgagtcggaagatgaaggccttgtgattggaaaatgcaagcctcctcccaaggctgccgcatcgaatattccgtcgcagccatcgaactgaaatgtgaccggtcccgatcgttccagtccagtccatcgttccagtccagtccacctctttacatttgatcctccccgcctaccgcattatcacccaccacttcctccatccctcgacacttccttaatatacctagtgaagttgttgtatatcatcgaatatcgttttgatactctttccgttccggttctcggcaggctgatatctggaaattgttcctagaaattgttccatacattctacatggtctgtacatatacatgaacacacgtggatatccatcgatgcctccctgtgaagggcttactggtgcccaccgaccggctgcgtctgcatgtctcttctgttctgttctgttgagttcagtctctgtgactatgaatctggagggcagagagtcccacagtgcatttcatgggtttctcttttctttctctttccttctgttcttctttcttggtcttatgcatgaatgaggggccagattgctttttattttctaactgtatgtaatgttgactctgtcaaaaccgggcgggttgggttttggtgccatattttggattccttgatcctcgagggactgcagagtttgtctcttgtggaatttgagcaatcgcgacatgacatgactgatatatgatgctgggaggcaagacgtctagcgtgtgatgaagaaatgaaatatttggggttctgggacttttggttgtatccctcccctaagacgaatttgttttccatatattgtagaacaccccttgtacggtagtctccaaccgccaatgccttatatcagatttcctccgagccttttctaagacgtaatggagtttccttccgctttctatggaagatagtgggtggataatgcggaatttgggattagttgcgatgataaaatttccgctgcttggtcgactgacatttgatgaattaagggtttagccatgtcagatttgatacctagctagaaccagaggcttatgcaaggagatctgtgaagttaggcaacagtcaggaaagccaggaaagatcgaatggaatgtacaagtatagacaaggcagactgttgaagtgcgccttggccaatagcttatatcctgcatacctaaataggactagcgcccatgggcctcagctgcgtggctgtgcaaaagctaaagccaagtcttctttagcgctgacccctccactttgggaagatcggggaatgcctcatggcctaatatgtgtatattcaacaggcagcgtcttttttttcatttcaatctctgagaatttgtataaaaatagtctgtgttcgtctatctgttatcagggtggacactgataatgccaatgtggggagagatctgctttaggaggaaacttgtacggagtagaagaaggtgggaattcttccttttactcttcgcgcttagcccccacagggaaatattatcggaatatcatatattaaatcaatcatccctacgagagtcctccgtacagcattggagtctacagcacgcgagttgctatacgacaagacgtgtttgacctagaccgccttgcgcacgtgaaaacgcctgaccttcaactcctccctcatttactctctattgcggacatctcgtcaaactcaaggtatccttgctcttagagatgatgaggcagtctgccgaccgctgacaactagctcagaggctccttcgcgtaccggacccgattctggacccttgcgaatgacatcccactacgtcgtcagacaccattcttcctacatcaccgggcgtccacgaccctgacaggcttgcctgtctaatctgccccgtcgctgaatttctgcgctatattctatccctgctatccctcgtctctgatcacaggttcagcctggccttcgtgaaagagcccccacccacgcgcattcgcaaacatgacctcccatgaccagaaccacggcacggcctattgtccggagcatgaccagaaccacggcgcggtctattgttcggaagatatgaagcatcggagcataagcccttcgccgcacggccaacaatatcacgaccccaaccccggtggattaggagttgacccctcctccatggccgcttattccacaaacctctcctatcagaatcccgacggcagcattggcggtgctgagatatatggatacccaaactaccttaccggggcgcctttgacacagacattatcaccgctggggggccagggctatgctccaaccatcaataccaaccttccgatatcgcagtcgttcgagacaagcctggtcaatcagctcgagcactcttcgacgggaatgagacggatgcagggcgatgaaaacttctccaatatgctcaactccaatcacccagaattggacttctctctctaccagaatcacagccccaacagcgcttccacccccgagtacgattcttcgttattgctagacccgcaaatgcaacagcatcagtctatcaaccaagcgataaaccccgctgatctagtcagccccatctccaatccttctgtatcctcgcatccatcacaagatcagcaacattcctcacctggccccatgtcccctccagggtccacgccgggtgcatactatacccctcggcattcacgacacacttcgcttgacccggctactgcggcgtatttgagcgcccagtcaggtccagactggcagtcggttatgaataatgtttccttccaaggccatcgacgtgcaccgtccgaggtgtccgaagtatcgtcggccagccactccccttatttgtctcagcacgaattcgatggcattgagaacaatgcatcgccttctttgattccccaaaatgatccaaatctttacgacaatggcctaggcatggaatcatttacgttatcggaacagcatcagcaggggatcagtcctctccacagcccatatatctctccgcggttgatgccacaacaggggaatgagatggtgccgaataattcatatctcactcagttcccctctgcgccgacagacatgtacggaatgccccaagaagacatgatgaacatgggccaattgaataacatcccgggcgacattggtcaagcttcacagatggctcctccatcgatcaatgttgagtttgccccgccatcacgagctccaagcttcggcccagccaaatcaacggcagactttgactcactgagccctccggctatgcgtaagtgacgatttacaacagtttgattcgtacgatactaaacagaacttaggatcccgtgttcgtagcaaatctgatccttatcaccctgcttcccgcccacgctctcctgcaacttcagcagcttctctagggccccgcgcacctgccaccccacgatctttgtcccctgttggatcgattggttcgcgcagtagtcccagttcgcgagatccctcgccctcacgatcaaaccgacgcctctccacctcatcaatcgagaaccggaactacatcctagatctcgccgatccacaaaggcccggagcagtacccggggagccaaaaagaattcagaaacacccagctaccttccagtgcaccctatgtccgaaacggtttacccgcgcatacaacctgcgatcccacctccgcacccacaccgacgaacgaccatttgtgtgcacagtatgcggcaaagcattcgcacggcagcacgaccgcaaacgccacgaaggcctccattccggcgaaaagaaattcgtctgccgcggcgagctctcgcgaagcggacaatggggctgcggccgccgcttcgcccgtgcggacgctttgggccgccacttccgctccgaggcgggccgggtatgcatcaagcctcttctggatgaggaatcgcgagagcgtgaccgcgtcttgctagagcaccagcagcaacagcaacaatcgccatccggccatctccagccaatcccccagccgctcgttatgcccaacatgcccggcatggatgggcaatcgacgggcaactttattcttcctgctgctcttctggcgcaatacccggctttgcagacattgcagtgggaccagatttcggctgtgggtgatgatccgagtgatattggtgggcggagtagctttgatgctagctctggtggagaatttggctttgacgaggatgattcggggatgggcggttatggtaataaccaagggggtatgtacggtgtcgataactctggtcagatgctgggggtcaattctggggaccctgggtactctgatcagaagtggactggatgacactggttctgcttgctgtctgttccctccttctttcttcctttcttcttcctattttcttcttttctctttttcctgctattccaggtttcaaaaggttattgcatgatgcattcatctgcacaaagccgattcttttgctttcgatgctgccagtatagaaaaggcttgttggcgttcatatataggatgctctcggagatgtctgaggatttccgaagctcggcaatcaggacatatgattgtcttggtgttttgtttttctttttctggtctttttagacatcggtgtttattatgccgtcttttgggtcgttctccttctattgatctcccgacttcccctttgcaggtggttactattctacccatctcattacttatgaaagaaccgggcatcatgatgctcttttatgatattcccatgctcgtttcatgcccaacttcttttcttccttccttcctttctcttcttctatcatggattctgtctcgtttcgatgtcacagcttcaacactatataccataacatacaatggatggctcaatcgaatgacttgaatctctcggtttagtacttatttactactataccaacttggttttgcacttccactccagtgaaccaggaaacagtagaatacagatcacattggatatcatctagtcggcaaaacaaatataaaaccatcaaaattcatcatatacaaggtgagaggactacaatatgtactccaaccaaatcatcaactccagatcgaacccaacccatttttatggtgtcaaaacagtctgcaatccacctccacctgctccactctctctttaagagtgagccttcttagccaacaggttcaaggcactaccagcaaggatgaatccacactgatcctgactgaaagtatgctgaacagggacctcgaacacctccccagtcttctgcttagtgacacgcagcttgatctcaccctgtccaccagtctgcagcacatcgtaaagaccaacagtatcaaccttatcacaagcatcgatacggtcatagtcctcacggtttgtgaaggtaagaggcacaacaccctgcttcttaaggttcgtctcgtggatgcgggcaaagctcttagcaacaataacccggccgccgaggtagcgcggctgcagcgcagcgtgctcacgcgcagagccctcgccgtagttatcctccgcaacaacgagccacgaaattccgcgctccttccatgcctctgctagctccgggatcccgtattgcttgccggcttcgtcgtaggcaacgttcgtctcgccggttgcggcgttgacggcgccgatcagggtgttcgccgagatgttgggcaggtggcccttgtacttcagccatgggcctgccgcggagatcgtgtcggttgtgcactggcccttgactttgtataggacctgcaggccggagagatcgcccttggggaagggggcgaagggctcgaggagggcgaggcggtcggaggtcggtgagacaatgacttcgctgcttgcgtctgggacggcggctgtggggaggaagttggggttgccttcttcgaaaccggcgctggggaggtcgaagccgctggggggctggaacttgaaggccgagccgtctggtgcggtcagggagtcggtcatagggttgaaggttgtgctgccggagtaggcgagcgcggtaacgagttccggtgaggcgaggaagttcattgttcggcggttgccatcgttgcggccggggaagttgcggttgtaggaggtgaagatggcgttatcttcgccattggggacgccgtcagtgcgcttccattggccgatgcaggggccgcaggcgttggcgaggacgatgccgccggcttcggagaaggtgtttagtgtttgatcgcggtcgagagtggcgcggatctgttcactgccgggggtgatgaagaaatccgccttgggcttgaggcctgctgcagtggcctgcttgacgagatcctcggcgcgggtcatgtcttcgtacgaggagttggtacagctaccgatgaggccggcaccgaaggtctcgggccacttcttctcgcggacggtgtcggcaaactttgacagcggcaccgagaagtcgggagtgaagggaccgttgatgtgcggctcgagctcggataggttgatggtgaccacctggtcatactcggccttggtgtcggcgcgcagcaagctcgaggggccggcggaggcaacctcggtagcagcatctgcgacgtaaccgcggtgggtggactgcaggtagggaaccatactaggcgagaaggggaagatcgatgtggtagcgcccacctcagcacccatgttacagcaggtagccatacccgtgcagctcagggtctcgacaccagggccgtgatactcaatgatgtagccagtaccaccgcgaacggtcagcttgccagctagggatagaatgatatccttaggcgaagcccatccgctgagcttgccctcgagacgaacaccgagaaccttaggagccttcagctcccaaggggcatcaaccaacgcatcaaccgcatcggcaccaccaacaccgatggcaatagcaccaagaccacctccgttaggagtgtggctgtccgtaccgagcatcatcaatccaggggcggcgtagttctctagcacactctggtggatgataccggcacccgggggccagaactcaataccgtagcgcttggcggcactctccaagaagtcgaatacctcactgttacccttgattgaagccggcaaatcggtatcggcaccacgctcgccgacaatcatatggtcgcagtggatactggccgggacggcggtggagggaagaccgcaggacatgaattggagcagagccatctgggccgaagcatcctgcatagcgacgcggtcgggcttcagcttcaggttggccttgcctcgaatgtcgcggccgttgttggtcccggtgagcaatgactcctcggcattgtccagatgcgcgtagaggatcttctcggcgagggtgagggcgcggtcggagccaagaactcggcggacatgttcaaggttgcggacaagcttgggatatgggggcatgcgggaggaggaggcctcggtggctaggccacgggcgaagagccgttgtgatgaaagccgtgtggccatctataaggtgttagattgttcaattgagattgtcttcgatgtatacataccccacgagaggcagaaacccgctgccaaactagctggctcaccatcttcactaatgttaagtttggggagaaactggggagaagataagaatgttccctttttttttcgtccggttgttatttgtatccgctgtgattggccggtgattgcgccgatttcggaatccaggcctctattatgtggggaaatagccctaaagaacttgtatctacggagtactccgtgaccatactggcgctactatgcatgtatgccatcatataagatgtcattattgcttcttcttcaaagaaaaagagcggtaccacctttcggctgcacctgtttagggctaaatcttattctcgatacgtggcggaatacggtctcccgaattctccttccatgtccaccattttcctagttttagcatcgttcggttttctactactcgctatgagtgctaagctcaacattctccagaaggacaaagccaccgagcctcaggcaggcgagatgcaatcctccgaggaacttccgacttatcaagagatcgcaaagtctcccgagaaatcctccgagaaagatttgctgtataaaacaaaaaatgctcagaagcctgaagaccttcttgtccacttgctttcaaccgaattgaatattgacgacaaaaaaactcttattcggaacgccccgagtcgtatatatgacagcgaccatcaccgccaaaatgccgagaaggttgaagctcagcttaaagacgcaggctacagccagcttgccatagtgctatattggtgtttcttttggcatggggtacagccgagggggccagaaagctggatcaaggaactgattgaaaatgatatcgagaggcgttggattgctcaaagaagagcccgcattcaagaaaaagtccaaaccttggaaacctcatcagatctacttctatcttctgaaggtgaagctgaacatgcctcacaactcgagttatacaaaggactgctccaggatctcaatagaagtcattgggctctttccagaaagagttggaacaaacgagaatccataaagagctggtcatttagtcgagcatataatatacaaagatcctatccagattggtatctctctacttcgttgagcgatgattgcgcaggacgaggcggctgttgcgggcggagctgcggctgctgtgaaaggccgcggacggttgatggattcgaagatcatatcggcaccagaggccattgtactacagcctgcagttgctgcatgaaggcccatggggttgaagacttggatgacttgttagttgaagagataccagacttggaagagctttgttttgagtacaagaagccctcttgtatgacacatcagagcctacggctgctgatgggttatgctttcaatttacccaaggcggaatgaagttaacagatttacaactagaatatgaggacctgtgaaaatgacgccgaaaataaccccttttggcgccagaaacggccgtctttccacccgtaactttggagggcgagcgggcgctttaccgcccaccgtccagtacgatcactattttgcacctaaaacttgtgtcgcgcttattgccccacccaaacagctccagcgcgtccctactatctagtgcgtccttatgtatcgtccagtacgtccctactctccaatgtgtccctactctgccactcctgcaggatcgtagacggctcgccgctctattcagggcactcagggcggatattcacccacctaagtatccttcaccacctgcatctgtacagcaaaggtacattttccaccatggccaaaaagttacaagcagccttctttccccctatatcttcatcactctaacctcgctttatcacaagcaagatgctttccaaacatgacccaatgttgaaatatgtgatcaatgttgggggtttcgggggaagcatagtaattatgaaatttagcggacagtgtttccacgcatggaatctcgttacagtcacaagctggttagtacacaattgccaccgaaacagctagacgccaccgtaaatgtacttgcggcggccgacgatccccgacaggtccgtacgaatctctgcccatgctcgcccacccgctgccggctgtcaatttaaccgtgccggtggccctcactttgaagtcttctaatgtatgcgccaactgcaaggcttgcaaggcttgcaaggattgatgtgataagtctccgccacgctgtcactactgtcctggtcgtcacggtcaagaaagcatttccaccttcagtaagcctgcgaaatacgtccatagaagccggcacgaggccagacacgcctcaaaaaaatgcctgtatttggaaccctggtataaaattccctaaggactctgggcaggatctgaagatattcttacgagcataccgtgctccttgtagggttattctagggtttctactgaacagaagaggctattgttcgcgaggccaagtgggctcgacagcgacagcgacaggcgatacaagctaaattatacgttcaagctgaagtcaccagaacgacagcataaatgaattgaaggagataggtcaagatctccaatcccttgagaatatttccgaggcatcgtcacctctactaatgactttatgctgcacttcgtctggagcagcaatcaaaccggctttacctgaatgcggccagtattacaaagatatcttccatcattaaatagcaaacactcataagatattgagattgaacctggagtttagtctatattttacaaaatccctcctccaaatcctttatacctagatgaagggcaaggacccgccggatttcacaccaaatgcccttccgtgcacttataacagcatcttgacgctctgttgcaagattgtaatggtatttttgtgccacgttgtctgagatgaagtgtaaatacccgaataaaatattgtgttcctggcaggcttgtgccaggtaaccgacctcgcagtcgacccagtccgctctatgcttattcttggccagccaatcctcattctcaaccaatgggcttggaacggtaacatgaatcccctggcaaatgtgggccatatgccctgctgatagggtggccgtgagtggacttttccaagagagagttttgttgttgaggagacttgtttcaccagtaacgagggcctggtttggaatatcttgtgttcgtaatgaaccagcctttcccacatatagaacgctggatatattgttctggtcttgcattgtgcgaacaacatttccgatgatatcaccccagaggctcatcatgcttccgacaaaagcgatgatactcccgtcagctcgacggaagtgcttccacgcaaataactgattcggctcatgtgtccctgtctcccaggggtaatcatgattggtgaccagttgatcaacataccctaggatgacagtatcaacaggacacataaaccgtaaattcgatttcgagagaagatccaggcaatcttccgaagaagggagtcgatattgtatcactgatgtaggcgcattaatcgagtttaggttgagataataagcgactaggagggcgtaatgcaggacgtagtctcgccccggaaaacacctaacctccagagtcgagtcgtcgatgatcactgctgttggtcgatgccagttgaaacgtttttctcgtttctcagtgggcgaaatatgtacattggggccgtttcggtcataatggccacagactacaatgtgaggccagacacgggtcttgatcaacgggtggatcttgccatcaacgtatgtctgaagagtttcgtgcatcagattttcgcctgccagaagcgagtcatggtctattcttcccacggtcatgctttggttccagccgagaatccaacgggcgagttggactgagacgagtgttgagaaccggattaagtttatcccgctcttagtttgtttactgtacaagaaatgcttgcgggcttataacatcgcctaaattgggctacttgttgtcttttgctcttcaaacttttttctggggcaaatagaatactcccatttagatatagtctatccattgatctcttttgaggcgctgataaatgtcagtgttatgatttattaatcttacatgatttgtaactaactagttaactaacgtattcggtaaacgagctgcgcaccccaaaacactatagtaaatgcaatatattccacatttatatctcaacaaccacgtctcaacttgctttcattacttatcgatagtcatcgataaggattcttagcaatatatctcaatttcaaataaatcagaaagttgcatcattgcggtattgaaaattacatcactgaactataggagatatatatatctcaatcactattatatcaaatttctcaaggctccctagagtgatcagatatcatatggagagtaatgggctacaagataaagtttatattgaccaccgttgttgcaatatcatgttgtaatttatcgcatttactatgtgttttggggtggccgactcgcttgggaaatacgttatggggcttacagctgactaatgacaaaacataaacatggtggagcattctcggtaatttacctccacaatacaccatccgtctgctatctccaggtcagctatcggtatctctctctcttcctctctattcctactcccgtcggcttcgcttggaatctaatacctttcagccggaatcagacagttctcctggtttcaggcatcttgatgtctgtctctctttggcccaatgtaaatttcatcgtttttctgcgaacagtctttcttgaggacgggatctatataaaccgacctaaaaggatcagaccttaacatctccaggattttctatgtcatgcgagtaaaatctttgagaacgtgttcaaatgtttcggggaactcttgctaattgtatgtgcaatttctcacgccatcttttatactgtccaacaatcaaacatggtcgacccttctatagagaggaaccataccaaagtgtacattgttacggtgtcgagcgcaaagtagtacgccgggagagccaaaatttccacggaagccctattgaccgttccaaagatcctaagttatcagagtcaatattctcggatgttctgcttcggcagaaaatgccacctatgagggcttgcatgcgccagatccaagcatgcaagttgaactccagcatgaaaacaaagaagccgagtatggttatggggattgtgcaaacgaagaagatccagatttttggatgtgtcttccactgtagagtctgggttttttcgttctcgtcgagtgtgaagaaattcattccgaaaaatccctacaaatattttcagcatgtctcgtggtcaaattctagatataagggtcttactgagatgaaagttcccggcaggaatagaagcgttaaggcggacacggtatcggacaagactttgccttcattccgagtttgcttgagaatgcctttcgagatgttgctattggcaacagtgacgaagttggaggcctattgaactctgttaactgcctttactttaaagaagaagacgaagaagcacaaatggtagccattcttctttcgcaggaggcactaacacatttgatctcattatccatgcgacccacaaacgccttagcccggaaattcaaatttgtgatcatgttttgatacaataacagcgcttttgaaagttgtgttgttgctgcagaggaagggaaggttgactggatccacacaccatggtctcgtacgatggcaccaaggttattagaggtcgcatccatggactcagaaatatggatcacatgtcgcgataattcatgaagccgactgtatcgtttgacaaggaactcgaatgtttcatcgttatcgaatgatccagttttcataaacaggtcctgaccgcgaccctaggatttgttagatattcatctcgtatataacattgggaaatggcaataccttctctatatctcggaccggcttttggaagctccagagatcatcctcacactgctctatcacgatattgagtgcatacttgagcatgagaaagggttcgttgttccagtttctgaaatcggttttatgcagcagacgtcttagccggagggtaatatcatcatcaagatcgaagcaaagtagcacattggtctcgtcggtagatccatccgtcctcacttggccactgtctccagtagggttgataagtgatgaccgccatagggtacagaatgccatatagtgccaggcgtactcaaaatcaggcgcaggggtggagagagggtttgtattactagaattccctggattcaatgtcctttcagcgccctttcccttgactcgtttggaaagaaagcgcgaaaatgtccctttgtgagcgttcctgttagcaatttttggtggctatgataagctctacgtttttcttcttaccatagctcgtttctgagtcgttttgtaagaaattgacagtactgccgaacaagccatttgcgttccagcccagtctttcaaaaaagaagttaggaaggaagaacttttcagtcaactgcctgcataaatctgcactccctgccatcttcaatatcccttcttccacttttggcatgaagctgagatacataagcaagcgtagaatctaactgagatgtggttctcacataacatgaatacctggctttctcaagaactatatgatacctattagcaagttaccatgatacatttgtttttttccctctgactgacatctttttgcaaaagttcagtccggcttagttcctgaggctttggcagactttcgtctcccggtagggatggttgcggcgggctagcagttgtctcactgcctaaaggctctatccatcgccagtagctgatatttgttgagtgatttactgacatttctgaagaaagtcatggaatgttgttctcgaaatttggcatcgggagtggtggggaataaataaccacgctcccatttcagcccccacacattgcgttcgagggcggcacagcgcatgaagctatctgcgagttcgttggctggggggcgtaattctagtgcagattgcttctcgactcaacacccatcatctgaggggtcagtttgcggtcgcctggcggcagatccttaccctatacatttctttttttctaaattataattctgaagggtcggaccgcaaaagtttccgcgaaccagccccatcgccaaaatatatatttcaacccacatgcttgaaacattaactagacataattgttaaatagccaccatatttaaatgtaaaatttaatattctatatatcaccctttagacgcaatgttcaatcattgaagatagtgggtgtaattgcgcaaaggcggtatggagaaatttccgcggaaacctatgcggcagaactacccctctgagccaccccagccaggcaacaatggaggattcaaatgagccgtaacaaggaagagtgaactctgtatgaattgctttccaagctaaagcaagcttgtcaccatttcgctttcttaattaattacttacttattttggaaaatggccctggtatcacggactgctgaaaattttgttatcattagcgaaacgaaattcaggaggtaaacaagacaaatagcaactaacagactgcaaggtttctaattcagtatacgagttcggaatcataccagttcccaaggacgatctttgttcaaatcggagtgagctcggtggctgggaagcaggaatcatatggagtatcggtgtgagaatggcgaggggggggatttgagcgttgggttgcggacagggttgcaagagcaatcggctcacctacctttcgagagatgcaggtgaccatacgacatctcagctgaaggatcggcgcaccacttcttttttttggtctgagaacttggccattgaccttgattttctttttccaaggtttccaacaccttgtgaatttgaatttctcgaatcagctttgacataacatgcatgtttgcctgcagtatggtaatgtaactccgcacgcttggccacatttcaggggtgataactgagtacaatggttgaacacgaagcaatcttgttgatctttacacggagtactctgtggtatcgttacactggagcacgcaatttcagctgcagcctaatttacaccctctgagcctcaggagaaaggtctatcaatgttcaaggcctgtctccccatagagctctatagagctattggagatccagcagtcttctacaacaaatgcagataccactataacgccgggaagcatccaacgcatacggtatctcacctcgcagccccattcttaatttagacaatgagagaaaaattactgattggggtttattctgtcgccgccatcttatccgcactttaacagacaattgatttacgattcaacacagcggttttggcaccgggacagcttagggcgtaaatgggtagggcgtagagacgaccgtttcttaaattccaccgatggacgtctattacgactgatcgtgcagtcgacaaccagtgtgaagttacctggcgtcgagacatccttatcgatggcatccccgccatcctgaaagtcatgttctgggctttagggcctcgcagtaaaaaaaaaaacgtgacatcaagcaccccattacacggtggagctacgtccagcacttccttaattcgaaagaatcactcaagggcgcaagtggaaattcggttcaaatacccagtcggcgctgtcataattcttgttttggtttgtctcccatattattaacttattattgtatctttagtatgttgacacctgctaaatagctatttttttcttacggatcttgctggggagccaagatacaacggtcaatatgagccgtttagatatcattactggggctacacgcccatttcaagcaatccctatgaatgtccaacactgccagaaaaccctgatccagcgcatgagcaacgcaatcctacctctgaacgtcttgaaagaccgcaatttctgtgtttcctacgcgaaacatatagtagcaacaccttgaaggtcagtaactgggagaaaaaacatagagacacaaagacactacagtatatctttattgcgtacacaaccatacaattctcgcatgaccagaagcgcgatgacatggaagttctacattctattgcggagaaggcagctcgtcgtgcaggagttcaagtctattggcttgcatgcagctgtatgcctgaagacaaatacctggcggacgacgtatatcggatcagcgatgtagtacgtggcgcacattcgctcgtcaatgccgttggaccacctggtcaaggccatgaatcccgggtttacaccacgcgagagcttctcaaagaatggggtcggcgaatgtgggcatttcccgaggtccttctatcgccaaatacgcatccgatattgatttacacccacggcacatccgagggagaaccttggcagaaacccaaaagcaaatttccttcagaggcgtgggttgacgcctcaaactcacgccaactggtcggtcattacgaaggctccatcatgttgagtcctctagagcttgtgacaattgcattccagtgcctatcgactaggcccttgaaagaagaaagcgaagcagatatagcatatgtctttatgggacttctgagacgcaggcccagagtcaatcttagtgacagcgcctttcaagctttctcgcgtctttcaatcagtaatgatagcgataaattgcttgaaaggcttatatgtctgcttctcaaatcaaccaagcagaaatggtatgtcatcgacgacatatgggatcgcaatttatgggattttgaccccttctgtccagtcgtcggtgtctgcctaggagattcggttgttctcagtggggcatttggagcctctattcgatggaaataattcaaatctgtgagcctgacccataggaacacagttggagggttaatcacaactttggcactgcgcgccgcacctgtgtggttaatcgtctcagcaggcttactgtctgctagtcaaactacagggtggaagatgatggtgggaatttacgcgccacttcggcatctaaagcattccaaacagccagctggatttttatgggcatcactatccttcttggcgctctttctcccttgatggtatactcgcgttatgcaggcaaaacttggtctgctcaaccctggctcttcggattcgaaggctacctgcccacccacgagattgaagctcttgttattgtagtcaacatgaaccgtttggcttggactccgtacagcagtcaactatcgcgccactgtatggttgacggagagtgtattgggagaaaccctacggaagacccgaaagtcaagcgcatagttgattccagtgcttacgctacgtacgaggaaccaaaggttttcacgttggtcgacacgtttacaatgacggtaacactatttcaagccgtgaggccgccggtgtctctgctcctctgtggaagcgagggtggtatgcaccgcggtctactctgttcctgtgactggcccacataaagactcactcgggagagtgtcttacgagtcgacactcggatgcttgacaaaatggcccgagttggccgaattcgcattggactggagaaaagcctgcatgatacctccccaatgtatgcgtttgtgaacaatgatgcgaatccaacctgatgatttaatgtacgattatatgataggaacgtggtatatacaatatttaacgcgtgtcatacccatgtagaaatggtccttctccggaaatccagatggctctggtggtgagattcgagtttcttgatcgtgtagttgattctggtcacctcctaatcatattctgacgggtttcacgcatatccgcgagggagggcaacactaacctctgctagtatctatgtgtttctactttgaaaccctggataacccatataatatctgccttgctatttatgggaacaattgccattctatcactttctatttacctgtcggtgcgcttcgactggtcgctctgcttcctatgtgtgctttattgaccaaaaaaggtagaataaccgcaacaatttattttcatcatttataatcgtcgctttagctagtctcagcttcgttcatgcccaatataattagggcctgggtcatatgtatgaggccatggcatatgcaaacatgtactttcaaataattttggcagtatccgcgcctcacggctgccaggaaccaacgagtcttgtgggtggtatccattggctcaatagggttgttccttgtttcattaggtttgactattgtaggattatcgacacgaaagaacaggatgctataccatcccagtggctacgcttctagatgataggcattgcaagctggatgtcagatcgagcggcatatccggtaaaaatgaaagaggcagtgcgtcgggctgaaagcaaatgcgcagtagtcggtggggaccagaataaaagaagggggcggcgatgagtgcaagatataggggtaggaagaatgaaaaagtgagagagtgagagagtgggaggaagagcagcgaagacgggtcttttatgtcgggagcattgaagggaggttacgtgacagcgtattggggcgctaaacccagaaaggcaaaactaaccgcatatggtagttcacaggtccgccgtttacaagttggattcactgcgaaatcaccgactggttcttttgttggatgacattgctacaattatgtcaaacctgtctattgctttagttgttcctattattgctgttatgctggttctggttgcaatccaagattagctgttatgattgacaactccttaagcggccgcaacccaaaacggtcgttgaaattattgaaattgttgacgatgtcctttccagagacggagctattacaagatgatgatttttcaatcctcaaatctgctaccaactctcagtcctcggaacacctgccagttatgaagagaccacgcaagactaagcctcgacggtaaatgcaagattatagaactagcacatctcgattatatctctttgcgaagataaagaggctggattggttgaaaatgcacttcggcttcagggcttgtataagcttgcccaagcggtgtgctatcattctcatatcaaacgaggctcacaagacatgacttgatccgattgatgttgatattgaaacacgctggattgtccaacgaatgatttgggtccatgaacagacacctttcatcccgggagcaagggctcaaaattctgaaactggcgaacccatagggatgtggatgctgcgagaggactgaggtcaatacagacggggcccgtgcccgggaccactgtaccacagcatgcagttgctgcctcgatgctcacgggattgacggtgaagttctggagatggaagacgtggatgaagttgacttcacagatcttgatccccattctctacggctgctcaagggaacgggatggaatgaatagtaaagcgggtgcttctgctagaaatattaaagtggggctttgtcttatcttcgcaaaggtcggaggtgtagctagaataacatgattgccaaattagctttttcatgtgctttcttagttgaaagcaagagacaacaaacaagaatcgttcgttaacagggaaattccattaaactcgaagtaaaaccaccagaggacaccgaagtgccctcgttcccaagacaaatgccaatgccataccatctcgaacgcctatcgtcacataaagaaaaagaagagaaaacaaggtaagactctgatcatacaatcaaagaccactgtatgccaaagacattccatggccaattcttcatcaaaatcggcgcaaattcacaaacatcgatggaaataaaacacataggtagagaaaaaaaggcattggtctaaagaacctgttgttttaagactctccttcctcgccaaccacagcggcacggagctcccaaaccaaatcgtagcattcggctagcagattattgacacagccctgtccctctgggatatctggacccacgtagaatttcccgtcaactcgcatgttgtcaatcgagttgagctgtttttgttagctttatacgcaagcagcgtggacggttacataccttcatgctgtatgggtaaagttcgcgtgaatttgcaacacccccagactccttgacttcaatcaagcaccggcggagagtttgaagttggttgtagactgggagtaaagcttcagataccggctctgatgaaatcaaaagcgcatagatgtatgcataactgcgacgaatgaggtatagaagcgtctgatcatgttagccagaatccaccaaagaatgcccgaaaataaaatcttactcgctgcgcatgcaggtccgccggctgaccctcagcatcgatgaaatttccattaacccgtgcctcgtcaattcggtcgagctttcgctggtatacgaagagatcggtctcgcgcagcgaccaagcttgtgttacagacaaacgatccagttggttgcggatgtccaacaatcgttcgtattgatctcggaaccgctcatcaattttgccctctctgtatttgaatcagtcgatgtctgtcatcccgttggcagcctagaacataccgctcaagcacaatttcagtccatcgccaacacctgtgaatcaaagacttgacattttcctgcccggcaagaacatttccctcgtcgtcaacaaagttgccgtcctttgccgtcttttcaattttcttcagttgttctcgaagagaatttacctccgcagccgagaactagcaattaacagtgagttagtactaatcagatgggttatagaattgttcgatgccatacttttgaccgagtgttgacagctgatgtagaccgcagaattgagaccagtgtctcgtgtgtctgcaccaaggaaggagccaatacagcaagacccttctgcaacttcgccagtgactggtcacagtgttccagacggctttccaaaagcgtgaggagagcgggtgagtatgtgtttcggccacgctcgagagtttcccgtgtagactctagtgtcttggtgatcgagttcaagtccttcgagctataaaatccagcctcttcaaggtggtcgagtaaacgctgcaagatcgtcagtacccagcgcgcaaagctaacgagagccgaaggagattataggagtcaatacctggatagtagtcgccaaggagtatctggcaaaatgtcagtcactgtcacaagatggcggggtaataacattatcgctcacactgcgggagcttcgttgttcttcccaactgtcaagaacagtagggaaatcaactgaaagcaatcatccaagatataatccactatcattgaacgtcagtcacctccaagtcgagcgcaaggtctactaaactcacggcgattgtgtaccaagcggcgatcttgctctttacgaacggaattgagtttctcgacttctgcgatcacttcctcataaagcggtaggacatcgcgagactttacatatgaggacttatcccgcttgattaggagcagcgcgtcgcgggtccggagcaggttttcaaggatgggctgctcccgcggatccagcgggaccgggatggcgggggactccatggttagagaatgcgatattatcagtgggcacgttggaaaaagcaaggttgagaacaggttggataaaagaacaagtttctttcaaggtgaagacaagtacaactaccgggatgtgatgtcaattaatgaatggatcgattgatagggggatcatgcagatacgaaacgccccgcgcggtttactgggggattatgtcatctagatcattatgtcatctgggctcagctccgcttgcggcttagcgccaagtcacgaggaggagaataagctaaaccagattagtccaagccctaagcgagggctttttcccacacacggcgcgtttgcccggttcgggtgtctatcattggcgttctactctcttcttctttcccatccccaactctcttcaagacacccagtccggtcaacaccacccgtcgacatgtctaccgccgagctcgcctgctcctacgccgccctcatcttggccgatgacggtattgaggtctccgtacgtatccaaaattccttgattttggtgggatagtggaggcttgaagatcgcacttgaagctttatgtactgtgcgaatttgagcttcgggagagacacaacgagacgccgcgaaaccactaggatcaaacaacaatcatgcgaaaactgtgactgaccttgaatcatcatttaggccgacaagatccagactctcatcactgccgccaaggttcaggaggttgagcccatctgggcctccatcttcgcccgggtaaatacctgattcctttccacaacccgcgccaatattgaagcaactcgaaaatggccgcgcgcgacaatttaagatgcgataactaattcgatttccaacacaggccctcgagggtaaggacatcaaggatctcctgaccaacgtcggttccgctggccccgctgccgctgcccccgctggtggtgccgctgctgccgcccccgctgaggccaaggctgaggagaaggaggagggtaagttttgatatacacctctggttttgagctcagtactaatccccactacagagaaggaggagtccgatgaggacatgggcttcggtctcttcgactaagcgtcttatcttcatatcgaatttaaaaactcgtttccttttttctctattcctcaacctcttttcccactgccgcatagcggctccctcgacgattctttattgtactcgatactccacgaaccccgctacgacctagaacccggggaagaaaaaaagaaaattagcaaaagaattcaaacggacacggacattcaatggagactgggtgctcggtgtgcctccgcgtcatgatgtggccgaggtagactggatcggataccgctgcgattccgaaactattgttgcttccatgattttaggggaattgaagacagacgtttggcacacttgttggtttgtccatgatcaaagttttgctttggtctggcgagtagatgtatggttcgttttctcgccctccacatggatcagctcgattttcttggtcctcgtgttacgtctgtctgcgaccatgaaccaacaacgaaggccgtctgattcttatctggggtacttgttcgtaggccatgcgacgtagttctgtagcgctgatcgccggtgttggatatgtttcaggtgtttcgatctcgaggtagtctttcattgagcgcaccaagcccttgcggtcatcgctcagcagactagagtccacatcgacgatacaaagtacgaagtataacatgcctagactttgagaatatcactctatctgtgttcctccataatatcatagtcgttccaggattgcgctattgcgagtaacatacccttagtattgatgtacattgatttgacactagcaaccatacgtgaatatatcgcatcagtcaccagtccactattaaaacaaacgctatgctattccaaacttttttgatgtccagcatcaccaacgaacgcatgcaaatcatcttccatccaaagacttttgagcttgaaaccaaattttagatttgacggtatatagaggtcattgctctagacgaaacagtcaaatgtgagcaaatgtcaatatttaggagatcgccgagagatgagggtcttgaacagcgtagatccggaattggaagaagatgacggcatcctcaacaatagttcccagcgatccaataagccaaggaagattggtgaggaaatactctttctctgtagaatggcaaagaatctatatgaacaccattagcttatgtccagtttatagtacaacgtgtagtatcactcactcctgcaccgtaagtcaggtttcccataagagagagaataaagaacaagagcgacaaccctagatcaaagtcaataccggcctgatacgtgcatgtgaagacagtgaaaaaataccttcgcacgacttctcgctccagttcttatagatctgaggcaatctcgctctggaatcaaagtcaataccaactcatcagccataacggcaggagacactcaccccagatagcacacggcgctgaaataccccagcagcagccccccaacagcctcctcagaaccattgttattatccaaaggcgccggcgcccacatcccggtctgccaagccatggtccaaccagtcgcaccaatgaggaaaattccaacaacactagtaaaattcttgatccatgccttgcggccataatcattctcctcgacgatcttggccagggtatcctcgacctcactctcgcgccggccaccagtgtgataccggcgcagtgagcccgacgaccggcgccgcgacgcgatagattcgctgaatcgccgccccagcaacggggtagtcggctccacagagacggtggacgagcgtcggcggtggagaggctcgggacgcgagttgcgcactttatagtacaaacattgcgcgatgagcacgccgtctgccatacagaagtataccgcgatcgcaacgatcacgggcacaagcccggctagtaggccaccagcaaggtttgcgacatcgccgacgaaccaaacaaagaggaagaggagagatatagcctctgagttgccattgcgataattctcaattagttgaggtacctgaaacagtattgttagatatggattgtgtccactttggatttcgaggtgcgagtctggttgctaaacataccaaaaggaaaaaccagcaggtcatagagactgagcccaagagaccagatgcagcctcacgggctgttaaaggtatagggccttgttccatgctgtctatgctctgcgacaaatgtgtgttggagtgaaagaaaattgcgcgggagataaggccatgacacaatctactcctggccagagtcccgccgtgtccaggccttaagggtctaagcacatatagccctggcggaaatctcttgacatatgttaatatactaaagtatgtgtattctggaataatctctttaaactagaagcatgttaattgactgaatttattattgcgggatgtgcatcagccaagcatattgggggatttctacagccaatgatacacttcattatggtaatacatatgtgctacatagttatgtaccggataatatctggcactcgagacctttccctttccgttttagtgctcacctctcgtcgcttttttatcactaagtaaaactgagcgcgtccctgagtaccgatccacttactaatcattatctgagcaccctgatttgctcactgagcgctctgagtatacggctgcgcggcctaagtaagctacatcaataaaatgcgatacgctaatcctatcacatgcaaccctttccatttagatcgcctatcaaaataggactggcgcagtcaacatggccgttcatcctagcggtctcgaccctatctactgtgccacgcgatcaagtttaccggctatgctgggctccttgatctccttcttcttcgacaactattgatataacattctcccgtcggcttacgggaagtaaccctggaatgaatactataaggccgtccattcctcgtttgtccgccttgcttcgaaagaaaccgtttcccatgccttctctagggctacctttaccgcccggcatagtcgttaataaagagatctcgccggtatacgattctaagtacttctacgcagtaaagcctagagaggtactcgctgatcgttaccaaaccctggttaaggttggctaggcgtatctttaatagtatagctcgcgcgtgatttacaagggtagccttcaataatttctgtttaattcgaagctctctctatctctaacaaatatataggcatatcgaaaagccagagagcgtcgtggtactaagaatcgccaataataatacgagttccactggtcataagcgtagggttaaagagtccatttctaccgcagacccgtcataccgcggccgctcacttatccgaacatctttagactcttttgaagttaaaggttcagaagtttcttattcgtgtcttgtgtatacgcctatgagggagccattgtccatgtatcagcggcgcttcgacgatagaaagatgccactgcccctccttaaaacatacattcgtgctcttcttacggggcttgattatcttcataaagaatgcagattagcttataggggtaagttcatccttggccttacgtcccgtcggtgatactaagcccgggcggcggtccaccccctccagaggtcatacaaaggtatcaatatatgcgagagtactcgtggcctggctgattgtcgggcacgtacactcatgttcttcatttttcgtgatgatctggttccgcctgaaagggtcttaccgaacactttactccgaggtggggaaaggagttccatacagtcttttgtatggtatgcctactccgtagtaaaggtacatatacatatgggcgatccctttcctcatttgcttggccccactgtatagtgttcgggtgctatggatatcaatccgagcttgtaacatcttacgctagtgcttgcaaggatttcgggtttccaaggtattgatgtacatggctattgcagaatacgtttgattcatagagtattgatcccttagactactatccatcttgaagctcccattactacttcagaacatgccatgaagtctcccttctcagtcctttttgccctcagccttgccctagggcaggctgcagcctatctcattaccccagacggcactcgctccccgggtagtaccgaagattacagttcttagatcgcgtacattaatatactacctgcgagttatgaagggatctatggtatcactgcggcggagtttgagaattgggtaagacgaacactggttgaactttgttgaaacattcactgaggcttctctgtcaaccccaatttataaccaagactggatcggactgtgaaatgctccctggtctgtactattgtgtgcagatcgattatatctacgatacaactactgtgggatttttttcagcgccagtaactgcaagctctaccgcgtcagtgtccctctctagcagccctgcgtctgtgactttgaattctacctcgagcaccatttcgtctttcttgacctcgctctcagccgcagctccgtctgtgacctcgacttcctctccctcgagtcaatgttcgaatttaaaatgtgatagtgaagtcaaggggcaagagaatatttgcagtcggtgcttaagcaatacaataaagtcgaaaaaaatagttaacgtgttgagttcagtggaatttccaacatagcccagggccatgctataaatgttactacaatctcattgttgtacataggatcatccaattattttctatgtacccagactaacacagagtgctaatcatgaagctgaattattctcctcgcataatcgcgagttcgtcctcgagcatgctgaccgcaaaatccccaagagagtccttgatagtgctgtctaacaatcgtcggcgagctgtttctgtgattgccgccatggcctctagataattcgtcaaaggtgcatagtccacaactacctcgctccaattgcctctatcgactccgtattgagaaaggaaaatacgaagagtttgcagaccctcgcgcgtgagccacccttcaagggccgccggatctctgagtggtgggcgtgagtgtgggatatcgaagtgctctgtatcctcgtcttcatcctcgaaaccaattggctcttcctcgtccgatgggacattgggagggcgggcgtcgtggttgatctggccaaggagatcctgcagccaattttcgccaccaccagcaggggctgcatataatggtgtaggttcagattgttgtttataggcttcggattcatagggagggagagggtcggaggatgatagtcggccagccacaaagtggtttggaagatgggttgtcactttggctatatcggacaagaccacatgacgagcgatgtccaaagtgatctctggtgggtcattgggctcctcgccagagatagaatctgcgacttccataatgagagaaatagcctcgggagtgttccaaaggtccttagcgcgggcgatgtagagttcggtaagcagctcatgagcgcctgtaggaggcatcttgccccatatttgcttggggacgtgctgaacatcaagttcctgtgctagcctgctgaatatccacgggtagcgggacatggcaagatgcagctgtcggcgacattcttggggcttattcaaccggaggtacgccattaccagggagcattgaatattggggaggttggcccagtcgcgactgaaccgtgtctgggtgcagagctgcacaaattgtgcatattctctacctcggagcgcgaggtggtcgatgagcaatctcatgcagtaaggatcgctgtcatccagactgagcaagagcttggcccattcataagcggttctccatgtgcccttcattgctaggttggtgatgtacctccacccaaccagccagagctctcggttctccgcatgcatgaaatcaagtctggcctcaccttccttgaggcgattggcaaacgaagagtgtactgagcgtccgatattgaatagggctctttccatcagatcagcagacacagcatgatcgccttggtgtttggcaatctctgacacttggagaagcgtagaaatatggtaagggttgtattggaggtgcccgatgagtctctgtgggtccatcgattcaacacagaggtcgaactgccgttgtacatcttggtaggccgtattgtgcactattcggtagagagtttccccggaaggaagcttctctacagtctccatgcctagccctccacttggagcacgaggccactcatctttaccctgcataagaacattgcgtcgcaatgtaactccagccagactttgacctcggctagctggactgtatcttcccgtcaaggcttgagcaaggtcgatcatttgtcgattgcgatcccgacgacggcccgttccattatccgttggttgatcaaagttttccagaacgacatttccaaacagtctgcgcatctcattcgtcgcattgagaaatttgggttcaatgccgagcaattcgctcgtggtctttgggaaagaggcctcgggattgtgtctggtagatagacctgcgccaaccgacgaatgcccacctgtcgataattctttcaaagcccgatcaatttcgtccaagtctccttcattcgattttgaaggcggggaattggccgaattagaggttttggctgccttcttcttcttctttttcttgttgctctttttgagttttatcggagttggttcaggctctggtgtgtgcgtgcgaggttcctcctcgatatcctcctcatcttcctcttcatcctcattttcagcgttcagcaaatcaaaggcattgatcttcggtttcgcggggcgcggggcttcgtcttcgcttgactcatcttgctgatcggattctcgctgctgttcttgttcacgcagcttctgcagttttcggattgctcgtgatgacatcctacacaccgaggcaaagcccttggaagtatgaaatagaagctgcctgcgaaagtaaagaaagcgagaaaagcgcgccgaaagaaacccgcggggaatgacgacagagactaatacggactagctccctttggataacatttacacgtgactttcatctgcggagacccagctccttgacaagcttgaaacctctctacatacattctcaaagccgttatttgccttgaaaaggcacataaatttatcagctgtcctattatcgctggaccaatgcgtcgggcgactgttcaggcctgccgtactgctcggcttgcaccagtatggaacattgccgctaaacggccgtgccctttgactttcaaccacctgcgaggtattcggccatatactggcagcagacgctcatcacacactccagtagcttctcaattatctatgcatcgccgcaaactctccctcgctgttatctcgaccgtcgttgcctctggggcatggtatacttatcagggcgacaccgttaaatcggcagcgacccagatccgggatttcgcatcgagtgccctcaactccgcctacgcagaaggaccggctgagaccacacggcgtgcattgctggtcagcggcgatcaattttacaccacgacgctctccaaagaccaacctctcgccaagcatacagacgattcagaccgccaagtcctcgagatgttgactcccgagcaagcgacccagaagcttcgtaagaacgaggagtcatatttggtcaatcggggcaagggtgttgttcgttacgatgttgttcaggttcccagcaactcccccattgaggacgaccatgcggagaagatagtggagatcccagcatccgtggctgctgtcagcaacggcgagccaagcagtgactggatgttctggggtgttttcgacggtcactcgtacgctagctcaaggttgaatacttatgatatagatactaactataagtcaggggctggaccacatctgcgaaattgcgcaatgtcttgatctcatatgtggcccgtgaattgaacacaacttacaaggctgcttctgctgatccatctctcctcgtgccaacatccgaggctatcgatgctgccatcaagaaaggcttcgtccgcctcgacaatgacatcgtacatgagagtttcaaggaagtcatgaaatctaaatcgcgacgggtcgccgccgagctccttgctcctgctctctcaggatcatgtgctcttctcagtttctatgactcccagtccaaagacctcagggttgctgttaccggagactctcgagcagttctgggccgtcgcggccctagcgggaaatggaccgctactgctctttccgaggaccagactggtggtaccccatctgaaatcaaacgtttgcgcgaggagcaccccggcgaaccatatgtcacgaagaatggccgaatcctgggccagctcgaacccagccgtgcattcggtgacgctttctataagtggagccgggatgtccaagatacgataaaagcgaagttctttgggcgcactcctcatccaatgctgaagacgcccccctatgtcactgccgagcctatcattactaccaccaaaatcgatccttccaagggcgactttgtcgtcatggctaccgatggtctgtgggagatgctgagcaatgaagaagttgtcggcctggttggtcaatgggttgagcaacaacaatctgctgctgcaagcacgggcagcaaggcttggttacagagctggttcaggttcgatagtcagaagacactgcccgtagaagctgcatccgacgcatcgagcgagggccagcggcgtcccatccgtcagcagcaatatgatatctctggcgcggctactcgatttgttgttgaggacaagaacgcagcaacgcatcttgtgcgaaatgcaatgggcggaaaggacaaggatatggtgtgtgcgttgctaacgctacccagtccttactctcgccgataccggtaaggatatctattcttttgaagtttattttttgagcatttggctaacatttcttagtgacgatgttactgtcgaggtcatcttctttggtcagggccctgattcgcgtactgtggaagtcaaccaggaagcgagtgcctcggaacagcctcccaagtcaaagctttaggcattattttgtcttgttttatttgtgacatttccaaagcattttgaagggtggctcttatacgtcttgcaatttcctagagaatacatagttttgtcaattttacgaattatttgcaatctctagattatttatataaagtcggctgtgtatttgatgccttggaccgcataagcccaatatgtatcctagtcctagctatattgtattattgtagctaattgttatttttctacctataacatagcgaaagaaaattatatgagattaccgaagtcgtacgtcggtaagaacagaggccgcatacgcggccgactattattatgagaagtaaaaggtattgtacatgctcgaaaacaggtgggcaaggagaattatgcacaaatgaacctcgaaaccagtcgacgaactatgtgcatcctagagcaggggcggtttatgaatgtcgacgcgcaaccccaagcggtgtcctgttgcgacccgaatgtggcctccatcttaataaaactctggaattcatttagatcagcgcgtgggtagctcgcgaccctgtaatggtgcatcgctgaacgaaccatcatcgattcaaggtaaagaacccatgtcattccaaatgattcgattctcgcaattgatatcagcgcaagtttttcaactggaaaggatcattatcgcccggcctctcgaaaacaatggcttgctttttgtatacgccaatctctaccggtgaaaacaccttattgtcaagtacccaggtttgcagcgtggcaaaattggtactggtgatccagtagagcataagtgcagttggtaactcttgaacaaagctcgcaaatccaatatagcatgtcaagactatgacaaaggaccgcaaaccggtgaaagagagctgcttgtacatctcgttctttgggaggaacgaaatcgtcttccaaggcttgactttccatcccagcagaacgttccccaatatcgacgcagtcagacaaaatggcagcacgcctgtggggtcaccggccagcaagtccgggaaccagagggcaccctcgttcgcaagagtgggctcgatggttaaatgcaaagattgggctgcggaggcagggtcttgcgactcgatgaacgacgatagccaggcaatgataccacgattgttaccgctcatcccacgcagactgtccataagcgcaataaagacaggtatctgcaggaaggcgattgctttgtgctttccggatactccccaacgcttatgaagctcagctgttcgtttccttatattgccatataattctttacccatttgagaacgtgttacatcgttgcgaggcacattggaaagctctctgttccttttgtctgcatatctcctcgcccaagcgcttataattggcgatattttcttttcgcgatggcgatggagtcgagtgtataacatgataggcaacccgacaaatgtacgaacaagtacagccgttaacggaatcgaggcagcccatggtagacatgaaacagaatggacgccgtgaataaatgcggtagagccgtcaagtgcaaggtcgacgatggatgaggttggtcttgttgggtggaagtgtcgaacttgcgagcgaggcaattgtatagctcgccgcattaggtgcagagcctgtgatgagcagagggcatgcatcactgctagcggggtgagagatgaaataaaaataaaataaaaaatggctaaaaaaaggtgaggctataagaattgcggaccggcaatcggatatttggagatcatcatgtgacacgtgattacttcattggcccgatcaagttgttgacagcaagagagggggagcattatctgacttgttctctagtttgacctcaaattctcttactatgtgtgatttctgatgaggtctctttaaatattgccttttcaccatggccctcttatcaaacgtcattctggccattctggtcctcaccgccacggctatcctgcttccgaagctaacaggcgttctcctcggtctagtgtttcggggagtgggctggctgatatggcgacgaacgcggtctcgccgtgagtatgtgatcgcgcgggcgcgatctgaagaggaggagttacgcgcctcacggccgaagggttcaacaacttcagtatcgcggaacggtggcgaagatgaggactgggagaaggtggatagctcaggcccaggcggggtacagactacaactggtagtgaaagcagtggtggtactggtgaggaaagcaaccagagtccagaggactgggatgggattattgggttcttccacccattctggtatggcattctctacacacgccaaaacacacaacgctgaccaggtgctacagcaatgccggcggaggtggcgaacgagttctatgggaagcaatacgtgcaacacagaaacgctggccgaaggcaatctgtgctatctacacgggtgaccatgaagtcaataaagccacgatgctggagaaggtggagaacaggttcaacattcacctacatgctccgaccgtggtgcttctatacttgacgacccgcaagtatgttgtcagtagctcatatccttacatgacgctgcttggacaatcgctggggtcactggttgttgcctacgatgcctttacgctgcttgtaccggatgtttttgttgacaccatgggctatgcattcacactcgctctgtgcaaatggcttttcccgacagtgcctgttggcgcttacgttcattaccctaccatatcaaccgacatgctcgcctctctcgacgacaagagcggggtgcaagggatcaactccggtgcagggaaagggtggaaagggaaagtcaagcgtcgatactgggagatatttgccaagctatatggctgggtcggtcgacagatcgatgtagttatgtgcaactcatcctggacggcagcacacattcgcaagctctggggcaccggcaagaaaaccagcaatagcagcggcgatgggacagcgtcatcgccggcggtggtgttccccccaacagcagtcaccgaactggaatcaaatatcgccgttgacgcggagagcgagaaaactcgccagcccgttctactttacatcgcccaattccggccagagaagaatcacccgctagtattgcgctcctttgcgcgattcttacaggaacgaacaaacaacccagcatatgaaggccaaccccctccacatcttgtgctcattgggtcggtgcgccattccagccctgatgaaacccacatctacaacctgcgccttctagcgcatgaacttcgcatccgcgaccatactacattcttgtgcgacgccagctggcctgtcatgctgtcacatcttcgtaccgcctcagttggtgtcaatgccatgtggaacgagcatttcggtatttgtgtcgtcgagtaccaagccgccggtctcatctgcgtgacacacgactcgggcggtccacgtgaagacattgtcgttgatttgggtgatggtgcaactggattccgagctgaaacagaagagcagtttgctgcttctttcgaggccgcccttgctcttccggaggcagagaaacttgccatgcggcagcgggcccgtcgctcagctcaacggtttaccgaagaagagttctcccgcaagtggctggatcaagtagaaaagcttgttaaggcatcgaaagtttagctttgtgatatccccctcgaaaatagacgaatggcatttccatttactttagtagttcgctgaaacaagaagtcaattctatgacaacaacccttaaggactgtacttaattcataataatcgtaaaatagaaatagaagatgcggtcaagtctaagactcgtgtataaaaacagacatcgcgactagagaatctcaagtcttctaaccagaaacagataatgtctgcaatacaactgatgacaatgcgaacaccctgaacttgcccctttaatcgctatcactggccgcaccatccgagtcagtcccattcccggtattttgaataccttcagccatgatatactcggtttgctgaaggatcttcttaatctcgttattgttgaagaccagctgagcaggtttctgaccatgcttattccgcacccgagggtcacagccagcctcacacatcatcttgatcatagcctcgccgagttctgcgtctttatcgttggcgtaccgcactgcgatgtgcaacggcgtgtcattgtccagccgggtcaacgggtcgcattcgaagtattggatgtcaaatagtgcgtccatggtatcatctgaccaaaaaaaggagttagcttgcatgaaagatatgaagtgggaaggtaaacacgtacagctgccgtattgggcacagatgtgcaatgcgtggtttcccatagagtctgtcaactcgttgaagaattgtgccacttgctcatttgtcttgtcttccatatcgttcagcacttgctcaattaggtggggttggtcccggcggcaggcctccacgaccagctcgcggggtgatgcgccctaaatcatagcggcattagcgttgacagtgagcaaagattacgtagtattcacctcgtcagccatttttgtatacgggtccacagagtccggaatacccgagagtgaagtcggtagtacagaaattggtgctcagctgttatggggcgcgtggagctagttgtaacaataatccggcgttttgtatgggtatattgctgaccagaatgaatcttccacggggaaacgaagtggaatatgtatgtacaagctggattgccggttaaaaaagcattcaaattcctggtaaatactacaggttgtcggagttgttccccattccacacgcgggccgccccggatatataatcgtccgaatccggtccggatttagccgcgcgcctatatctctcattatcgacggcgatatctgcacctgacgggaactacattgtatagctgctgagaacctacctttctcctggtctagctgtctggctctttcttagccttacccaccgtatccgccagatcaccaagatgctcgtctgtatgtgctatctcctagttcacgctgtccagcgacagccagaacagaaactgattcctctccctagtctgtcccaactgcagcaatgcgctcactatttctaaagcggaatcgagcacaagattcccagcgggtgtgaaccgctttgaatgccgcgtctgcccctacgaggcaccgctagagaagaactatttcgagaagaaagacatgaaacaaaaggaagtggacgacgtatttggtggcaaggaagagtttgccaatgctgacagtgttggcagtaagttatctctgctatcttctctcagaagtgacatgtccgtcgagtatacagggctgacatactcttttttttccttatagctcaatgccccgctgaaagctgcaacggggaacgtgcgtacttcttccaactgcagattcgcagtgcagatgaaccgatgactacattcttgaaggtatgtctccctccttacatccaacgtgaggtacccgtgtctgacagctccagtgcacgtcgtgtggtgctcggtggagagaaaattagagttgggcgacaaggctgggaacaagtcacatctttcatttttggattttactacagcgaggtgcaactggcgcatttaccaggtgtttattggggcatatatgactcaaaactatcatgttgatacaaaagatacccaaattgatcaacactgaacattactattttgcgatcagcggactcaaaatttaactttttatgcatttttattttgtaccataacttattgtagctttggctttttctgtgcttcgccactataaaaatattaccgacttagtacggatgtagagcccgacattggttctgcctgggatttgctacagagaaatcggatcaccagacgccaaaaaacaaataaaattctatgcatgacattgttggtgggattatttggcggtgagcatgttgcccctcacctgcggggttctgaaaacacaaagagagaaaaaaagagaaaagaatggaacgagtcatccaatatcgccacaggaattcgtacggtgccagagaaagcgggaaataggtacagtaaacaatgcaacctagaaggttctcacccaaccactctgcgttgctgcccagttcaggcgtttagagccacagagtgggctgggacggagccgaagaaaaaaaaaagttttcacaccgagtggagtgccgtggcaggagaaaaccagagaaagggagggtgtttcaagcgcagggtagacagtacatggttcagtatgggagagtccgtattagggcaggtacatgtacctcaacccaccaacccactttgcaaaatctgcgtacacgggtaagggctagaaccaatcacaagccctaaccaaaagagggcttggccccacctgctgactcgcctcgctcgcttgcccctccatataaggatttcccctcctcccctctcccacagatttttcttcttcctctcgtctgctacagtgagtttttcctgcccccctactgcttttaagccgtctcgctccctcttccaactactcttactgattacttttgctcagtacctctacgcgttctgccgtagtctctgagcaagtttttccacagattttttctagtatcttacaaagaactacaaaaagttccaaccgtcatcatggggtatgtgaccatcactcactcgtttcattctcatcagaacagacactgactcagtcccaacagtaaggaagagcgcaaccacatcaacattgtcgttatcggccacgtcgattccggcaagtctaccaccactggtcacatgatctacaagtgtggtggtattgaccagcgtaccatcgagaagttcgagaaggaggctgctgagctcggaaagggttccttcaagtacgcctgggttcttgacaaactcaaggctgagcgtgagcgtggtatcaccatcgatatcgctctctggaagttccagaccgccaagtacgaggtcaccgtcatcggtaagagacactgtcccatccattcagtcagttgcacacattctaatacattcttacagatgcccccggtcaccgtgatttcatcaagaacatgatcactggtacctcccaggccgattgcgctattctcatcatcgcctccggcactggtgagttcgaggctggtatctccaaggatggccagacccgtgagcacgctctgctcgctttcaccctcggtgtcaagcagctcatcgttgccctcaacaagatggacacctgcaagtggtccgaggagcgttacaacgagattgtcaaggagacctccaacttcatcaagaaggtcggctacaaccccaagtccgttcccttcgtccccatctccggcttcaacggcgacaacatgctcgagccctccaccaactgcccctggtacaagggttgggagaaggagaccaaggctggcaagtccaccggaaagaccctcatcgaggccatcgatgccatcgagaaccccgtccgtccctccaacaagcccctccgtcttcccctccaggatgtgtacaagatctccggtattggcacagttcccgtcggtcgtgtcgagactggtatcatcactcccggcatgatcgtcaccttcgcccccgccaacgtcaccactgaagtcaagtccgttgagatgcaccaccagcagctcaagcagggtaaccccggtgacaacgttggtttcaacgtcaagaacgtctccgtcaaggaggttcgccgtggtaacgtcgcttccgactccaagaacgaccccgctgccgcctgtgactccttcaacgctcaggtcattgtcctgaaccaccccggtcaggtcggcgctggatacgccccagtcctcgattgccacactgcccacattgcttgcaagttcgctgagctcctcgagaagatcgatcgccgtaccggtaaggccaccgagacctcccccaagttcatcaagtccggtgatgccgctatcgtcaagatggttccctccaagcccatgtgtgttgaggccttcaccgactacccccctctcggtcgtttcgccgtccgtgacatgcgccagaccgttgccgtcggtgtcatcaagtccgtcgagaagaacgccggtggtgctggcaaggtcaccaaggccgctgccaaggctggcaagaaataaattattctcggatgatgctcattatgccgtgatgattttttcttttcaaaaacaattactggatcgaggtagatttgctgtgtagtagaaatgactaccacatttttatgacaaattcttttccttgtagacttgtaatattattaaagtagctgccgttagacgttgtatatttttgtctcagcctatagatcgcgggatggcctgaagctaatcttggcgtgacgcctgattgacagtacacctatagaccatgtaccttctgtcaagactgtataatatttgcttcaatccctctctttctttctgctataccgataacattaactatcagacttgaacttcttattccaatcttttgtaacccgattgaatgagagggcatcacgatcctatgatcctcaaatcggcttcatatcaagcgatatcaagtaaggaatagcaccatgttcaatctggggcccaaatacatatcagttccatcctagttcgatgtaaaagcccgttctagacttatttctgtaggatcgaccccgatcgatcgccacgagacatggaaacatatatattttgtcatttgtgtacatctcatagttcatgtgtatgcgtatatagtctaacggagagaagctcctaccaatgaataccgatttatatcatgatcattaaagtgttaccatccaaaatctgtaaatcatactataatcatatagccaagttctccctcgatgagtacatgatgctctctagtatcaggtgtgaagatgaagaatatgctcgaagaaagaatttgcctacacatagtaatgaccttcaaaaattaaaaacacaaatattcttgggtatcaagttgcagatacctacatgtagtatgtatccaatgttatcacggcgtgccaatcgtagacatatcaatcactcttcctcatactcttcctcatcagaatcctcctcttcctgagcaggagcacgcctcgaagaccgtctaggcccagagcttcgcggcgtctcacgttcctccccgtccccgttcacatcgctcgcatcatccgccccattagcttgtatggtcgccggctcaatcccaagactcctcccgagcttcccctcaaagtcttccaggtcctccctctggaattcagtcaagttctcgtggggacccctgtttttcccatacacagttcgcacaagacccgccacaccactagtcccaacctcaactttaccccgaggaccaagaatatactcaatcacctcctcgccgccatccatctcccgcgtcttgataatgtatccctccttgcatagccgctgcagtagtttatccgtgcggtcgaccggcgtagcaatctcggcgttagtgcgcgtcaggtaccggtcaagtttctgctcagccagcgaaccgccgttcagcagaatcaccgcaataatgaaactgtacaggccggtgtatgtgctttcggtgtagagggagggtgccttggtcgggatgaggatatcgggggaacgatatgcgagcggcagtgtgctagtaacgatccaggacttgttacccgaagaaggcttttcaattttctgcgcggctgtagtacaggaatgccatgccatgtcagtagtgaatactcagaaatagcatgagtctgcaacaaagaaaagcaagacatggaatccaactcaccccgtcgctggctgatggtgaccttctctcgcgccggtaactcgctcatctccataccaaagcgctgtctcatttcccgctgcgcctggtcgaaaactagcttgaattgtcgcgagccgtgctcgcccagcaccttggcgctgatatcgttgcgccggatcgggagccgcgaatactcgctggctagggcgagccgcaccaacttcttgaccattgcgtcggtgctggtcggtgcgctcggttcgtcatcgtcgctggatgctgcgggcgatgaggcgggttcttcggtttgtcttctgcgacgagcgcttggggttacctcggtctcgggtgcttcgttggtctagggaaggcggttagttggtggataaaccaagggttgtgtttgcatacgcgtcttttgcgattcgatgacattttgattatgtaggtgtgataaattgcaggtgggtttggagagacgcgacgcgatagactgattttaccccattggggttggtctgtgcgtagcccttatcgatggttctttgtttcagcagatgggcttcgatgtcagtttctttattttaggttccttcgaggattgtatttggtaatttactgaagaaagacatcattttcgacgtctacgtatatggagagttatatgacgaaatccaatgaattagcgtcgaggtataattacgtcgatactgggaacgtgaactaaatacaacgtgggcaaggcaacacagagcagcgatgaggtattatgttctctaaaagaaaaggaaaaaaaaaaaacaaacaaagaaaacgaacgctccaaaggtcaaagagatctaaaatcagtggttgtacttttcattgacaacctccttcgtctcctccttcttactctggaggaaagtgctaacccaagccagggattcctgcgacagaaccaagctggtagtaacaaccgccttgcccgaagcaaagacaccatcaccaccacactttttgtactccgagccatacacatcgaagacatggtgcttgacatcgccggcgacgcggacaggcagcgaggcactgttgtagatggaaccgcgcagcttctgggtgtcctccttgaagatcgggaagcgggtatcgatcttggtcagacccttgtcaccgagggagtcggcgcgggctatgtagggagcgacatagctgtatggggtggagaagtagggtagaacgggtttggcgagacgggtgtagccctggtcagcgaattcgagggacttggctccgtagggattgcccttgtagtaggagatagagtcggagatgatgggataagaagtcagatgctagattggagatgttaggatcattctcgttaggctgtagtggggtacatacgtcaaggaactgagagtagtgcttctcgccgttgacgaccggttcacccatttttacttctgcgtggggcataaagattgtaagttgagaaggatatagtataagaatacagaagagaagagagagggagagagggagaggaataaattgggttgtatagaggaaaaaaagggttttcacatgtgattgcgctgtcattatgcaatgggtcctaccgcaatcgcatcatttgccatacatcgtattctcgggttatttcagtcctctacttgggattattcttcttctttgctatgttcttttgctatattcttttttccatcttttttacgaagacaagggttcaatggccgattctaagtgatcccacgccaatccattgactttggacatgcactgaaaccgtccgagcaattgcatggctaattatagttgacgtatcccaaatatacttgtttcgattgccaaaatcctgaaaaatcccaatcgatggattcttgataaggtgctttcgcatgtgattgcgggtctgtgaaaggtggttccacttgggtgtctatcaatgatctgttctatctctcttccacggtcaattcctaccttcccaggtgcttcccagggtttgatattccccagaatttatccattgaactcaaatgaggggagacctcgcaagataaaccttgttttcgtccgttccaccgtttttcgttggacgagactgcttatctgcataagaaaaccgcctagacggtgacagatggccgcagatcggggctagtttgccagcatatggctgatgcttcggcttctaagttatatgagtctagcccacctgcacgtacattggtgatgctagtcatgtccccacctattggcctgaccgtcggcccctcgaaccgcttctactctcgggaatacgtaacagcctccggtccaaatgtactccgtagggggagtaagattgcgcaaggtcctagccggattggagatcgttctgccgaccccgggcatgggacgggcgaagtgattcgcagggtcatccgaatctcggcgcttgatgtgactctatggaacggttgcgttcgataggcatacactactatggccatactatatttattggtccaggcggtttatctgagcgatagaaggtaccttggcacttcgtacatattacctggtgttcccaatgcggctaacggaatgcggaatgttatgtattcggtacgactatcagggtaagccgagaaggtggccaggctttccattgtggtcggcacatgaaaaactgatgtcgacacagatagttatgccatggacatcgaaattctaagccggagaggcgatgttttttttttgccccccctccttttttttcttcttttcttctttctcttttgctcgggactacgccgatcgactagcaacccactcgattacgattaagctactgtgcagatccctgtataccgtgggtcttgaccagcaacggttgtcttgacatctacaaagtacaaactctgccctttctgttcacgtaccctttacccagaataccgcccaaaaaaatacatcttatcattgcttttggagcctttggaatattgtgtagtcgaaaatccccatttaaactgtggcaaagcacgccactcccctacttctcatgtacaattgggtctaaaatggagtggcgattggcatgaagatgcttacatatggacatctagcgtcgcggaggcccgtgatccgttgttagcgaatgtatcaatttcacatgtcaaactgaggcgtcgtttagcgttggcgctctcgatgtcaaggattcaattgtgttgccttgtaaatcaattggtcgactgaggtgattatcacatgaaatcaggcgaacacggcttattttttcaggcgttttatctgtcaaatattctcgaagcgctttgcccttggcttggcagttgttgttgcattactacgtcaacatgtgtgccaagggaatcagctgtcggacatgatgccgcgcatgaggggatgtattttgtggtcgctttgttgtgtacggactagactccacctgaaaggaactccgggtttcacatattcttggtatcgtatgatttactatgttgtactatgttggagtcaatcggctattgcacccgacagctatgcactctcatgcaggctctcattctatattcccaccctcatgatagtatcagtgtatatcagtatttactttggtcaacctttactccttgaaatgtatggtatttttgagaaatactagcgtagcagactgtatgtgaattatattcgtggtgggggaaaatatcagaaatatatatgtagtactccatatactaggccggaaaaaaaaggagacctggtcaatacctaccaggtactccatactatgttaaagaaactgatcatctcgcatgcgttgcggcaagtccttactagctgaggtagagcgtgatcggctgcgactaggtgaagggatactatctcgctgcgctttagagaggcatctgcaatctaatggagcgggatcattgcgcgcacgattccagcgaagatacgaaacatcatcacgactgacaactccagggtggtcatttgatagagacatattccaaggatggacagaatcctccccggcaggagtgtgcaagggtgctttaagaacaacctcaaagggaccaacggcgagcgagtcttgctggagaatcaacttccaaagatgccaaaagctggtatcaatcatgtgttggcccgtatttgcactgagccgccaataacacgggaatttgttagtcttgattctcacctctgcaacctggaagggcgggagcggaacctcgtggaggaatctctcaggtagatcggctatgcccatgaactcgctctggatctgtatccactgctcctggtattgttcttcgaaaaactccgtccactgtgggtttacgccgctgtcagctaaccccgcggacatctcccagatgaaatattcggcgttgacccacttgtcaatactgaacgatgttttcagaagggaagtagtgtcgcggcacacgttacagtgcatcaggatatgaggcgtggcccgcacggctaccatgggcatgttgtagtgtcgatggacctcgttgtccaaccatttctccctagcgtgctcgcggatgggtttgagaggaatggccatggttagaactagatgactggcgatctattgacttgcagcttggtatggaccctactaggtgttcgagtacttgattgaaataagagatcagtggtctatataaatactatgtctggattgaatgaaatatcctattctgggcccgtggagactaagataaaagaagacaatgaagataaaagaatgcgtttctcttattcgaagattgaaccgaaaatatcgttcaaagaccattgtccccttgtttactgtttactagagatcaaaatggttcagttgttcactggaacttggaatcaaagcgactctttgtttggaatagatgaaaatactcgagcgctgtcaaaactgaaatgccagtgggtaccagcacaagcatgcatgctatatgctagaaataagttcaagattgaatcctgctagtgttgaatactcaagcgctgatgcccatatcgctgaggtatgatatgtcttggcgggggtggggttcacatgtggtatgcatatagactgtggaggaagacaatctataattgtatccgcgagcatggacatgaggacctagacctttgggggcttcctcgacatcctcgtcgtgatcgggaatctagagtcttctttggaactagacgagaggcctatgtaagtaattgcttttcgaaaactacgattgcacgttacggatagacatggttacatcgatcgtagcaatgaaaccatgagattgaatgccctgagacaaaccacatagctacagggtcatccaggcgtgggaatgatctgtgttaggaggacagaccaaaatccttcccggcctatgcgaaagaggaagatgtcgaccagttttcaggtaatagacaacattgattttgaaataattgttcattttccatttcattcagacggacaccaggtatggaagtggcgcccccgttaaaactggagttcatcgatacattcacgaatctgtttccagctatggcgtatgttttcccatcccatgctcgcagggaccgaatgttctcgatggcttttcgacctcgccttcacctagaccagtgcgctcaaaacgacaaaacgcccaaggaaaccgtttagaaacctgtttcggagaattagtgcaagttccaatatgcatatatgtatatcccgggccaaacatacgcagggcagtgaagaaccaacggttctttccgctggtgtaacggtcctcaagagccttcttgatggtcttcttggcgtcctcgcgctgggagacctccttgaaggtgtcgttggtgatggtacccttaagaccctcaagctcgagagtgtaacgggtgggcatcaagtggttgtagttgatgaccttgatgaaaggcttgatgcggctgcggcggtcgacaagcttcttgcccataccacgggtcaccttgagggggtaacgctcgataccggcaacaatggcgtaggagaaggggtgcgacttggagccagcatcaacgggctggacaatgacgacctataaactcgaacaaaaatgcctgattagcactccgaattttttttcttgtcgcgcagttcctccatagtgcattgtgctctttcaaatctcgagtctttcgcttgcaggtcgttcgcctctttctattctcgtgctcaatttcggggaggatcaggatcttgtcgtaccttcttaccggcgtagcggccacgggtgatgatggccacacggcccactttcatgactgtaacatatctgtcagcatataaatcgtaaggggaatcgaatggtgaagacgtacacttcattttgtgaaggtcccgggggcggcgaggatggctggttgtcgagatacggaacggtcaagatcaaagtattcgtttttgcggatgtgaggtagagggtttcagggcacagtagcgatttgtgtgttgtggattgattggttgacttaccgacagatggcgactagcctgtttggggatagtttccccattgagccccggggccggaggagatgatgacataatctgcatgttgtgcccagccttgacggtgtagggcaggtgcggcccagtcctgctcaccgcctgccttgattcccgctgactcaggttgtgtttacatgacgatcgcagttgccccggttgctagggccgtgagtgatgtatacaagactgcgtagctcctctttctcctcatccccacttgctttccacttatcaagctgatctcccggtaattttctctcctccaccgagctctgagattgttagctttgttttgttcttccagcgtttcctccttgacgaccttgtttttactttgaacgcattctacacataccctacatacattccatccatattgtcaatacctctctgagacatctggataatccactcacgaagacatcatggtgtccccagagaaggataccccccgtgaccgggaattggtccggcattcactgacatactccgagtccaaagttccaatgtaggtttcgcaactaacgccttctgattcttgtttcgcgaaacccatgggtgatttcaaacaaatgctaaaacgcggtctacgcaggtgggacagttcggatcccgagcgtgcgcctccaccgctaccaatgaatcctcgttcgatgagtccgatgagccctgcgacgaggtccaatgtttctcccaacattcaagcagtggccgcaaaatttacagagagacctagcgataatgcaccgagctcctacacaacaaatcctatgccactcaagtcttcctcgccagagaggtcgttggtcaaaggccagcacaagcgcatgcagtcactacagcctgaagatacccgacaagatgcgcgcagcgactttctgaattaccttgacaacagatccccagagcgtcctcttcgtgcgacgattattgatgggaccaagccgcgcgaccctaccaagtcaaccagttcgccagtgctccgtcaagatgtggaccgcgagatgaaatactccgtttcgagtcggtacttatccaagccaatattgggagagagtactccaacctcagctacaatgttggctctgcaaaatatgcagctacctctagaacccgaccctccatcaccttccaaaccgccaaaaatgatcgctgggccatttgagccacaagcttattccacaaagaatgcaagcatggacaccctctcaaatcaaatccacagtctcacggacattgcaagcagtctgcagcgtgagatgatgaatttgagccgacgcagcaaagacaatgccaccgacctggttagcctcaaggcggcaaccaacgcacgcgatgaagacattcgcaagagtctgaaggatctgtcctctcatcttacaaacaagtacctggacgctgaggctacaaggtttgaattcagcaatcttttcaagggtggtgatgggcctaacgccaagggttcggatagtccagtttcgaagaggagctactccgtgcctcgcatgcctagccctaatccattcgcatttgatcgggagtcttgcgtctcacctgctccgatttccgacggttccgcagcccttgctttgctcgaaaaggtattgcgcgagatggcaactaaggaaggtgaggaaaggatcttagaggtcgttgaagaaatcaaatctcgaccagcaactagcgcttcggataaagattccgataacaaggtcactgctatgctcgaggagatcctcaatctcgtcaaagaggatcctgcaagcaaagccctcgtgcgatcttaccgtaggggcgccaataccgataatatccaatctgggaatgcctcctccgagccgagacgatctgggtcgatgggatccgtgcaccctgaaactgtacgtgcactagacctttctaactctgagaaggagggcagctcttcacccaataatccggaagaagttctggcaattcttaggagtgtcaagaatagcgtcatcgaaggaggtggaatgaccaacggcgtgaagtcgttggtacgtgagctacgaggtgaggttctgggcatgggtcgagaacttgctcgccgattagacgagatcgagagttcccgttccaacgatgagtccgaggagcagcctagagccgctggcccagaggaagtttccgccattgtcaaccgcagcctggacgacctcaaagagcagctggctgctactatcaatgagagtcggcagcagtcgtccgacttgtccgaattcagatcaaccatgaacagtgccgcaatctactctgttgtgaaaaaagcactcgatgaatttgaactacctcaaccccaagcccattcgcgaggtgctggaatggacagagaagatatcctcgagactgtccgtgaagcctgggagacctacaagcccgaaatcgagttcaacaactttggcttggaacgagacgagatcctcacatgccttgaagaaggtctcaagtcttaccagccccaaaatgaacagacggtcacctacgatcagattctcgcagccgttgaggacggcatgcagaagttcattcctccacaaatcgagcatcagccaagcatctctcgggatgagatcatcttgaccatccgcgaatgcttggagaagcagcccgagtctgcctctagatctcttgacgaggaacacgtcggcgatcttcactcgatccgcgacgagattctcgatgcggtcactgggacaatggcaacgaacaacatgcagcccaagtctttggacgaggaccatgtcaatcacctccactctgttcgcgatgagatcattgaagccattactgaggtagtgacaagccatgccgcaggtcccaaatctgtggacgacgatcacgtcagtcatctgacttctatccgtgacgaaatacttcaagcagtcgtcggggcaatggctacgaatagcacaggctccaaggagttggacgaaggtcatgtccatcacatgtactccattcgggatgagattctgcaagcaattaatggaatgatggacatcagcagcacagggcctaagacgttggatgaggaccatgtcaatcacctctactccatccgcgatgatatcattgaagctgtcactggggcaatgggtaaccacagcacctccaggcctttggatgaagacaatgtcagtcaactaaattctatccgggacgaaattctcagcgcattggccggctctatgacacaaagcacactgagcaaggactcatacgactctggccttggccgcgacgagattgtccatgccgtttctgatggcctcgaagcccatttcactgcggctcgagagatggatgagccacgcatttcccgccatgatgttatgaatgcggtcaatgaagccttcgatgctcaacaatcagctcttgctactgctcacacgaacatctctcgtgatgaaattttgaatgccattgccgagggcattgaaagttcaatgaacgctcagaaatcagcactcagtacgccctctcgtgaagagattttcagcgccatcgtggatgccatcgaacactcacgttcttccctcaccaacgacggggagcctagtatttctcgagacgagatcctgggtgccatcttggaaggcatggagcacttgtcaaaagaaccgaatatctccagggatgagatcatgaacgccattgctgatggcattcagaactcgagtaactctgtttcacgtgctcttacactgcctaagcaagacagtgacgatcagcagtccactctttcccgggaggaaattattaatgcgattctcgaaggtattgagcagtcccaggcttcgctcggcgtgaatggtcagcctagcgtttccaaggaggaaattatgagtgctatcgctgagggtattgaagcctcggcaagcagccagcagtcagcgctcagcaccaacgtccaagagccctccatctcacgcgaggaaattttggctgccatttcagaaggcattgacaatggcaattccatcacccgggagattgagctcaaccaggacgacctcatggaggcaatcacctccggtctcaacgaggctatcagtaccgcaaataccaacgttggggaggagatgacagaacgcctccaatctttattcgaaggcatgaaagaggaattcaagcaatactcggccgccggtggaagagataccgagcaagtcctcgacgccatcaaggatggcctcgatatcgttcgcaaggagatcgaaacttacgtggttactgcggccgatctatccggcaaggaagaagtaattgacacggtgaaagaggggttccgacttctccacgctgatatggaaaagaccattacagattcaacacttatgaatgccccgcgaggcattccggatacacctgagcttctggatgccatggaaaaagagttcgagcacctacggggaaccatcaccactctactcctacgcaataatgccactgaagacaaagatgagatcttggacgctattcgagaggcagctgatcgccacaagaatgaccccggcgatgatgttgtcaatacgatcaaacatgaattcgagagtctccgtgagcgcatggagatgagtgtggttcgtgccgaacctggtgctgagaaagacgagatcatatccgcactccgtgaacaattcgacaccctgcgcgaggagacgtcgcgtacagacggcaacgaaaccacgatgtcctcgacaagtgagctcctcgaggtattcggagatagtgttgactcaatccgtaacgacctgaagaaaatattggagaagccaactgagttcgacagctccgagattctcgataccatcaaacatggtctcgcagatctgaagcttgaaatggatactctccgtgattccaacaaagaactggatgatgccagtaccgcccgcggcggtgaactcatcctggcaaacgagcccagcattggacctgacattgacggtctgaaagtgcttatcaccgagcttcatgacaagatcgaggccattgaaactactcctcatgccgcagaagcttccgaggatactctcaagcgctcacaccttgatgaagtccttcttgcgattaacgaagttcagcttgccgtgggtgagatgagtactcaaaaaagcgacgagaacaatcagacggctcgaaagaaggacattgagattctcgagcagttactcttgagtgcgaagacccagatcgatgaacttgttttcccttcaccggaccaggtcgctactcctgagcacattggagccctggagaccatgatccgagaggcaaaagaatcgattgcccagttttctagtcgcgtcgaagccgagactcccacaaagtctgaaatcggcattttggagagtctcatcaaagatgtctgggttatcctagatgagatgaagagcaaaactaaagatggagattccgataaattacttaaaactgatatcgaaacggtggaagcaatgatcttcgaggtcaagactcaaatcgaggagcttaagcttcctgatgtgaatactcttccaaccaagacggagatccaggagctctcgacacttgtctgcgatttccgagagacgatggaggccaataacgaattgacagcccaagggttcgatgctcgcaaggttgagcacggtggtcttgccgagaaaatcgatgaagccaagtttgtcgtcagcgagctcggggacgaactcaaaagcaagcttgatggcagcaccgaaggcctgaccgagcttaaacagctcctcgaaggactagccatcaccgcagagagcttcaccaccgtcgaaaacatgaaggagctcaccgacttgatcaaccgagaattcgaacgttctcggggcgatgaagatgcagtcaaggccgaaaaggaggagcgggatgctgctacaatagtcaaacacgatgagacgcgggccgccatcattgtggagcttggcacaaagattgacgagaaaatttccgaagtcttggcgaagtatgaagatgcgcatacgtccctccagtcgaagttctcagaaaccgaacagagagatctggcacacaccgaatctttgacaagtacgagaagccttgccgaggacatcaagcttgtcatcggtgctatgggcgatagtgttaatgatacctgtgagcggttaagtgtggacacgaaggctctcatggaacaagtcgatcagtcccgccagcaaatggagagcatgcacaacgatgtgagatcgcaccaggagcaatctcaagctgaaaacgaaagggctgcagctgccactgatcgagtggagagcaagctccttgaattccaccctcgtattctggaatctgtgcaggagatattgacaatcgtcagccagcactacgaccactcccagaaatcagcagaagacttcaagtctgaactgtccgcattgtcttcaagtatcccagcaatgctacctgcgctgcttccaccggaaccagaccgtacacttgccatagaagatactccgctacacagcaaactcgacgatattttggaacatgctaagaacgacaaagtccacgagattttgaacactctccttgatcactcgaagaatgaccaactccatgagaagcttgatcgtgctcttgatcaaggagcgggttcgaatgatcaaatatatgagagactcaatgagttgttagatcgtgccactaatgggagcggtcccgttcatgagaaactagacgcactgctcagccgtccctcgaatccgccggaatccgatcactctgctacccagatggcgaagctggatgagatgcacagggatatcatggaaaactctcgcagaatgaatgagatgttcgctgcccagtcagtgctggtcgctgaagataccgagcgaaagcgacgtgaagctgaggaggctgcgattgctcttgaacgaagagtttcgcagcgtgagcaggtggaagcggagctcgttggcttgcaggaagagaaggattctatgctgaacatgattcatcgcctaagagcagaaaaggaagacctgatcaagcaaaacaacaagcttagcaaggatctgtccggtcttgaaacggccctagagatacgccacgaagagatgcggcagatggaggaccgcgcggatggccttgagaaacgcatcctggagggtgtgctcgaccatgctcgtactattctcctcggccgatccaatggctcgcaagccatgaacctgaagaggaaccgcagcactcggagtacccgttcctcacgcacaggcgctcgcagtcctagtctggcgagcactgctagtactgccaaagagcccagtcgcagtctgcttggtaatggtgtcggaatggctttgaaaagaaccccgacttcgctccaggctggaaaagttgctgtgcagcccaacatcggaaaggaacgtcggattcttagcttaagtcatgtcactggaaaccgcggtgtggaccgacaggtgagtgctaaatctggcatcacgaatttgaagcgcagccactctgtcaaatcgaactctcttcgcaagacttcttgggctggtccaatttctgttgtcgacaaagagaacgagccattccacgaagaggacgagcaagccagcgaagcggaagatgctggtccacagcgcaagactagttatgtgcaaagtaacgcacctaccaaccggaagacgagctgcgcagaatctgaccttggcactgaaaccgagcatggctatgcaccgagcaacgctggcactgaccgtcgaacaagctacgcagcaagcaatgcaggcacggagcgcaagacaagctactctggcagcatcgtcgacagtgtagttacagatgcctcagatcaacgccgtgtcagcggaatgagctccacgaattcatacaacgtggcggagagctcaatcgccgagcacgaccacgaggactaccatgatgatatttctatcgatggctccgatgcgcaaacagcacgagaggacggagagcattctgggaatgaggaccagaatgaggatcacgaaatgtcccgccagatccagcaggctaatgaggctgcggaagccgaagctcttaagctgttggctccctctagtggcagcactgatgttgcagtttgattgatatgttttgttttggatggagttgggcgcttgcaccatgaatgttttctttctttctcatataccacttttgtttctgcgtttcagtgcttggatgatttggatgactttcgtttgtgaccataaaggtgtattgtttaatgatgattttcttttgtactcttccaatacacctgtgatgtagttcgattgtatagatgtatcatgtatgtggtcacttgttgacgggtattgttctggatcacaaaccatatttttagctgcttgaaatcttccttcgaacgactagtccttgtagacctaattttccttttttcatcatctgtcacctttgtacaagtcgacaaagcccgacccaacgaataaggcaggtgatcaggtgactcccaacaaatcattgctgcctgaggctatgccgaggccagcttcacctggtcatctctctactccattctcggatggagctacatatttctcccctattcatggttattgggctttcctttgtttccatttccatttccagtttttcttttcccttttccatttcttcctgatagacaggatagggtgccctctcaaccgcatatagatctacattccgacctccgaacctcaaggagctttcccccacatcgggtgatcacagctggttgaggggacatcccacgatgttggaccctttcccaccgcctccggaatggctgcggagctttgtagagccctataccctccggttgaactgcccgacacttgccgaccatatccacgaggttatcgcagcgtttgccttctacctgttcatccatacagttctctcaccccggctctcgccaatcctctttcctcagtcttacaacaagctcactcctcggacgaagctgaactgggatatccatgctgtctcttttgttcagagcattgtcattaacgttgccgccctgtgggtcatgttcttcgacaaggagcgcagctccatgacctccggtgagcgggtcttcgcgtatacaggtgcctgtggacttattcaggctttggccgtgggatacttcgtatatgacctgattgtcagcattgtgcatgtgcgcatgtttggccttggaatgcttttccacgctgtcagcgccttgtgggtgtttagtctaggctttgtaagttgcgtctccaatctgcctgatataggtacattcagtatcaagaagatcagcataaatgcgttttcattttttaaaatcgagaaacatctaacatagtttccgcagagaccattcctaaactacttcgctccgaccttcatcctctatgagctctccagcccattccttaatatccactggtttctcgacaaagtcaacatgaccggcagccgcgcccaatggtataacggcatggctttgctcttcagcttcttcgcctgccgcctcgtctggggcagctggcaaaccgtcattgtgtacatggacatgtggaatgcgcttcagcaaacctggtctgcagctgcagccccactctctgaacccgtgagcatcaacgcacatgtcttctacccagcccgcgatggtagattgtgtgtcaacgaagcctgcgcgcgcgccaatgccgagatcaccaagttcaaggagcataccgcgggaggtgtaccaacgtggctggtcgtgacctacgtcggatcgaacttgatcttgaacttcttgaacttctactggttttccaagatggtcgagactgttctcaagcgtttccgcactccggctgatgctgctggcatgaagaaggggacgaaagagcctgttagcgcagagaaggatgcgcagctcaaggaggatattgtgcatgatgttgtcctcgaggcggcttccaagctggagcagcaggagaccgctattttgcaggatgagctttcctcgttgcatgaaaagatctcttcaagtgtggactcaggtctcggggaggagttgcggaaacggagagcagagcttgtcgcgaagcttcctttgcctggtgcttgaggtttggatgggactttaggttgttatttataatctatgtgtctttgagtgctgtgaagtcttcttccctcttttgtccatgcttgctttatgattgattgagatgtttgtgactcctttctatgttgctttcccttgaaattggtccgacctcttctatactggtccagagacacaacaacgcctggcgtgatggctctattattcaaacaattattgaaataaatccggaatcatattggataatatcggattcttagaatacagatttcaaaacaattcctgcctgtcataccccggctacaccagtccgaacaccacacaagcgccctatatcagattaaaaaaagaatacatcaacccatcttcatttcgtaatggttggcagtgtgaatatgcgactttaaacgaaaaggacaagcaggatatttaccgagcagccgcagcttcgggtttagccagcatgtaccgcacagcttccttagcaacctcagagtcccacgggccgtcaacgccgccataactgaactcaggtccgctaccatcctcgccgcctccacgggtagcttcacccatgatagtctcgaggtcgcggcgctgagagctgatccagcgacgaacaaaattggctgggtccttgctcagagcagtgtagaatgagtggcgagcacgggagtgtgtaagggcctggacaatcaaagcaacttggtcatcaagcgaggatatctggcgtaggccacttgtgtacgctgggttctgagtgagagccatcatcttggtgcgcagcgggtcatcaactgcgacctggatatcgtagatggtcggggttgggtcactgtggaactcttcatcgacgcgaatggtgtagggaagcttgattggttccatagggctggtgtgaggaccgatgctttcaggaatctgggggaaaaacatttgctcccggccaaagatctacagagcttgttagcggatactagaaacaccagacattcaaagtacataccgagcgtagacggtgatcacagcgcacttgtcgcttctcctcgtcttcttgcaattccatggctcggatgtaatcccagattccgagaacaattccactccgggtctcctcttcgacatctagaacctcggccaactccttgctcagcttgtatcgctctggaacttcgtcccggacaaggctgatggtgacattcagattgtcctgcgaggctcgggagaactgtagactatcaaattcggcaccttggggcgctggtgtgttggggtgtgtgttgggtttggaccagttaaccggcttaacctcctcggggattgccgagacgggcttatcaaagtcgatggtgatagccttgaagaaatgggagaagcgctgggactgtctcttggattcggatttctttcccttatcctcctcggccccgtcgtggtccatcgcatcttcatctttctcatcctcatcgggaaccgtagggtcggtttcatcgtccaacagtcgtccttcgatgcgtaccttgtagcggccggagcctgggttgttgcccgggccttgccatggctggttttcgacagtattagagatccagatgcgcatagtccgatacttcttgacggttttgttgatagagtcttggatatccagcctcttccgaacaacagcagcatccaatcgcttttccaaatcgcggaggtttttatattgctgaacaccctcgccgatgatcacatcttcaatgccgtcggggaggttcctgtcggtcggcttgcggctgcgccgaagggcagcatcattcgggtggggcataggacgcgatgccatgtactgttgggcaacagcgtgttgtggcatcggaacaggcattgcgccacctatagagacggaaggttagagccgagacgaatgagtggagacagatgaaaggggacatacctggccctggggggcgacggggcgcggctggagatcgctgtacatttgagggcatggcccgagcataatgttgctgcattggagcttgcattgtggagaaatcaagcaacaaaacggtgctgggaggatatggatggggggaaaagatgcgagatggtggagatgcgaggtcgcgattcttttgcccgtcgcgctttacccttttcggacactcgcgaataacaccgtcgagaggagaaaagtcattgttctacatgaaattttgcagttgagatttgatgaataattaggagctagacatataagatgtagttcacatgttaagtactaattacgcgcagatctaagggtaattattgatgtgatcgtgcattgtcttgattatttcctatcaagtcattgtctcaactgcattggacatttcccatcttttctattccaggagagacgcctggttagtatacagaccttccaccacattgccgagcttttcaatggtctctagtgcggcatcgtaagcttgatcccgttctgtctcatcgtacacaatcagacatcccgagccctggtccaatacaccgatgatcaccttgtccaagatcatctgagacagcttcctttccacctgctgtgtgtccaaacccaccatcttcgcaatgtggtccagctcgacccggctgaagggttcaatgaccttgatcaagttttgttccagcattgcatcgtaaagacgacggaggtggtttcggatgaatacatcgctgcccagttcgaatctgtagtccgaaagagccttctcatactcctccaaagaccggttggcgtgggcccgtgccacggccttcattgcctccaggcgtggactggcatacttttgcgcttgtttcgagccttgtagctgtgtgacatcatccaccaggttcagcatgattttgcacagaagcatgtactgcaatgtcgccgtggccaggtcgctctcatcgagcgagctgtacccctcaagcgcttcaatgaaataggagtatgaagtggtgaaatccttgtcttcggcgtgcagcatgccactttgcatatccagaccggcctgcaggttcggtggcgtgtaaacggaggcggccgacgtccgtgcagctgtcagagctgcgcgtgccttggcctggttgcccagagcgtggtacacacgcgactcgagcagttgtacttccaccagcataagcttatcatccaggcgcttcagctcacggagaagagagttgataagagtgagcgcatcgtaataggattgcttctgcatatagattgcaacgagtcgggcttcgagggcctggcggaggaacgatcgccgctcggaaatagcccattctatgcatgattggatgacgttgccttggagttcgagtgtgttggggatttcgctaatcaggtccagaagttgacggactgaataatcacagttaggctatttccatagaagtaatttagcgcgcaacttacctagcttggctgttttcgctttggcaaatgacgagaaggtatcacggctggtcttgatgaggtccgcgatctcctgtggcttcttcgcatcccgatgcaactcgcccagcccaatcaaggcatgttcgtagtctcgtgaagatgcctctgtagatccggggccctctgagagaatcttctggtaactggtcgctgctttcgagggatcctccttcaccagatctcgaacttcttggatccgtggcgagaccttggatgacatgataaaagacggcaaatggcgagtgagggagatagagaattaaaggaaaggagaacaatagaagatggtggtttgaagagaggttgatgatcaggtcgaatggggagctcgaagctggcggcagctcgctgtcctctcaccgcccgcttggcaaatcaaacagaaaaaaagttcgctcttggcatttttcttttcttttctacttcgttttcacaacggcactatggtgggtatttttctttgaaattatgtcttttggatagccatgctaatggattatagaaaatcaaagcactctcccgctccacggcgtcgcaacaggcccccgggtccgctgtcgttcgccagtcgcggaatctcgacccgactcaacatccttttgagcgggctcgtgaatatactcgagctctgaatgcgatcaagatggagcgcatgtttgctgctcctttcttagcccagatgggtaacggacacgttgacggtgtttactctatggcaaaggaccccggctcacttgaacgctttgcaagtggcagtggtgatggtgtggtgaaggtgtgggatctaacgacgcagggcgaggtttggaatacccaaggtcatgaaaacatggtcaagggtttgtgttggacgccggagcgaaaacttctgtcatgcgcgagtgacaagacgattaaattgtgggatccatacaactcatcatctgaggccccaccgatggcaacctatctcggaaatagtgccttcaccagtgtcacgcatcatcggagcctcccttcttttgctgcggcttctggtgtcatctctatctatgacctttcccggccgtcatccacaccatcgcagactatgcactggccgaccaacgttgacaccatcacatcggttgcattcaaccagactgagacttctatcctggcttcaactgctatggaccgctcagtcatcatgtacgacctgcgcacttcccagccggtgcacaagacgacattgagactggcatctaacgccatttcttggaacccaatggaagcattcaactttgccgtggcgaacgaggatcacaacgcctacatcttcgatatgagaaagatggaccgtgctctcaatgtcctgaaggatcatgtggctgctgttatggatgttgatttcagtcccacgggtgaagagctggtcactgcctcatacgatcggacaatccgcctatggaacagatcaactggtcactcgcgtgacatttaccacacaaagcggatgcaacgtgttttctcggcaacattcacgcctgacaacaggtatgtcttgacaggatcggacgatggcaatgttcgtctctggcgtgccaaggcatcggatcgcagtggagtcaagactgcccgtcagcgttccaagctagagtacgatcaagctctgatccagcggtactcgcacatgcctcaaattcgccgcatcaagcgccagcgtcatgtgcccaagccgatcaagaaggctggtgaaatcaagcgcgaggagctcaatgctattaagaggcgcgaggagaatgtgcgcaagcatactaagaagactaatctggcgccgagaacacatgagcgtgagaagatgattctggccagcgagcaataaatcgatccactcgattcgaccaggctcggccgcaagacttgcaatcgaaactatggtcgaatggggaaattttcaatgaagcagatcgttctgctttataatccaccctgcttggacctatacaagggtcccttttcatgattcatgccaatatacaccgctcggctctatttgagccacctatcaatatgtcttcccagatgtctgccggctttgagtaacagcagcatctatcccactcagatatctcgcaacccgctgcaccgtagcgggtagcacggcataccaattcacgagctttgcataaaaaggcaacctgatcacaccacctcgaccgctatcaatcgctgccaccatctcccgggcaacttcgacgggttccaggattggcgcaaagaaatgattcggcgcgcgcacccagtcgaacaacggcgtcgacatctgaccaacttccactagcaatgtcttgatcaacgggttaacccgaacttccgcttctatcgtccgatgcagcgcgctaagtcctgctttgctcgctgcgtagtctgacagtcccgcagcactcagttggcccagcacggagctgactgtgacaagagttcctccactctttgctgcgatgatcccaggcaagaagacttggtacagatggaaagccgctaggagattggtgcggattgtcttttcgaatgcgtccgctggcagatcaagcagtgagagaccgttgatcctggccgcggcacagttgataacgatcgtcggtgttcctaactgcaagatttttagcgaatcagaccccaattgaagcaagccataacgcgctatgaaaacaccttatccaaatatttaaatcactagaaccgcagtaatagtaggatgatatgggatcgaaggtcacaacgaaaacaaaagtaaaaaagcaaaacctacctcttgcaaaatcctctccctcgcaacttctaaagcacgtctatccgcgacgtcacacgtgatatacaaaacgccctccccaaagacctcatcgcggcctttttccggaacatctttaatatccagcacagcgacactcgccccgcgcatgctatacatctgcacaattagcagacctagcccactcgccccgccagtgatgaccacgacctcatgctcgaaatcgacttttcgcggggcgccgtaggcggcgcgctggttgataattcgcacgacgaagaggactgtcatggccgttgcatagcttacagcgaggatccaggctggatctgttgatggggttacatgggcgcgtaggcagaggacgaaaatccaggctatgaaagggttgagtagtgatttggagaggatgcttgttaggatgtcgattgtcaggaggctggtgtgtggattggtcgagccgggagttgtctggggtggtttggctgttgtttttaaaacttgaggatttgaagatgacattgcaatgtctgctttggcaataattctggctggagattggatgtcggggatgtgcaatgagacaacctggggagattccagacgcgtttggttttgcggggctgataagagataagacgatctatataattctgtcttgtaaaaagaaaaaggaagacagacaagtatctggagacccaaatctacagagtgatgaactaggaattggttggccaagctgggtttgtctatgaaattcactattcgttcaaaaatgttggctaaaatccagaaaatgtttcattctcactggatctatcccggtgcctttcatgacccactgctaaggaatatatgctaagactcggtaccgctctataaaagctcacaacatgaatagaaagttctagctatctttgtataaaagttccaaaaattggaacaaaggagatgagagcagagcccctttatatggcggacaacgggagcaccagacacgtacagtctgtatccgcagagatcatagcaaagcccctcaggtatccaaagatcgccagtcggtagcccgcatgtacatgcttcgtgccattcgcagcctagcctaggccgcctacagagacccgccagagccaaggataacaccgatcgccagacaacagcagacatatgttaaatacgaatctggagctgggtgacgggtcaacggttaaaaaaacacactcattaggggctacgatgtgcaatgtggacctggagtggtagtgtgaagaaggaagaaagaaggaagaaagtgggaggaggcaggtatttataccgtacaggctgtgactcaggtcgacggggaaaccacgatgggtcacgagttttgaccaaaagggaaggcacctgattgggaaggtgccgtcaggtttatgccagagctacatggaaacatttgaagacaacgtaagacagcccctggtatgaaagagacgagagaagattagaatagaaagaaaaaatgtagagaaagactggtctattagggtgtagtcaaggatctatcttttggagacgaaaatacgaaggcgtaagaaaccatacagaacctgtagagcatcacgccataaggacgaaattgttatagctgaggacatgaagaaagacataagatatcgaaaaagaaagtcagattcacgaaacatatttgatcatatcgagcatccctcgttcgttctattcttgacgaaaaagggtcatcgtaaatccacgaaactccccatgattgtgttagacagtgcacctccgacttaaaccagaacaagatcgggatcaatcaccactgcatacgctgacccagaggcgaagaaggcttcttattctgagcctgcttcgctgagccccggatagaatgactgaaggtaaggcaattcttatcctcagccatgatgtcaagatcgctcggggtcgacggcacctggaagccttgaccagcttcggggtaggcgcggtaatctccagggtcataatccgattcatgctgggatccaacttgtgaggactgagatggagacggagtgggggattgggagtatgatgactcgtcgtcggtgagcaggtcagagttcgaagaaacgaaagaggccttgcgagcacgtgcacctgcaggcgcagcatgcgatgtaaatctgcgcgtggctctggaaggcgtctgggaagttgttgttgtagtctggggagcagttgtggaagcatgcgtgtgaggaattccggtggaaacctggcccgcagcgatgccaccaagagccgccggggaagcaggattgggagccgtatcggaaaccattgcagcaaagagttcttcgggattcatggaagtagcattgggggctgcggtattagaattcttgccgatctgttggtttaaacccatgtcgctagcgttcttgaatgatggttcctgattttcccaatcaagtaatgcagaacgaacgttttccttcagtgtaggtttggaaacccgattattgtgtggtgtcgcagaaggtgacagagtgaaatctgtcacgggttgcatgtcccggggaaacataggaaccgacggccactcgtttgagactctcactataagcttgactagcgaatcatgcgaaagagatgacagatacgcccgtcgttcctcctctggataataatttccaccaatttgaggttcagacacaggctgcttcttcggtcgttcgacttttttcaatttcgttgcaccattcttttgatatttggtctgggctgcctgacgttgctcaggtttacacttgatgcaaaaccaattcatctccgaaatttcgataacctcattatgaatgtttggactgtggcatttctgatgccacggagcatcacatgagtcacatagaacaatcaaattgttcgaggggctgtgtcctctgtaacaggcggtacaaactatattgacctggcggttcggacgcttccgctttttagctgccactttgacaggccctttgattgtcacaggctcagcttgtcgaacagttggttgagtaatacggcggccagatcgagttcgatttgaatctagggcagtgctggcatttctatccgtttccgtagccccagctgttgtccaaacggcctcttcctgaggcagtgctggtgatccccaaattccccaggatatattgtcagccataagttccgggtgtgatgacagtggttggatcgcctcggagacgctttcatggtcaaatatgttgccctcatagacgttttgggggcgctccggattgatatcgggagcagggaggtccatgaattccgatgagaccctcatagtgagcttcctttcgaataagtatttccaaagaagtattggccgacgttctcttggaaaattagttgaacttgggagcgaaagaagagaatagagcaacaggtgatagaggcactatttgtgttcttctagggcaatccgagtctttcagcctactgcaaatcaaaatagacactgtagtgtttgccgagtgggcagtcgaacatagttggctcctctcaattcttcaattggaagtagggttggattgaagtcgtcgaatgaaagcctttgtatatgaatcacgtgatgttccaatacaaccttaaatgtctgtcgtcggtcgtttactgacgtatttcgcctaatgtgaggatcttattaatttaattgtagattttgatgcttttattcgtcatcaaagctatttcgttatctcttatgcggatctagtaggttctatatgaagaaggaatcgtctcaatatactacaggaacttacgaccgaaataacctagcaagtaatgattcatattgtagatttcttaatcatctttaatcttgttttccttctaaacagaaactagcagaattgcccaaggaaagcccatgagcgtatacatgtaagagatatgaccaaaaaggattaaaagacgccagaagaaccgagggtaacttggaatggctgtgatttccagttttcttatatacaggtttcgggaggtgtcgttcatggttctcatagattattcagggtttaggatatgaccccctcatccttcatgcgagcgatatccgcctccccataaccgaggacattacccaaaatctcatctgtatgctggcccaaagtaggaggaggcgtgcggataccgggcgtcgcttcggagtacttgataggggtgttgaccatcttgatgggaccacatgcaggatggtcaatttccgtcaccatgcctcgtgccaaaactgttcgtaacgtcagtgctgtttatatcacatgtaaaggaaatacgcagacttaccatgtttgtgattcagggttccctgaatgtcgttgacagccgcatagggcataccgctgccttcaaagatatccaaccactcctgcgtggtcttctgcacggtggtgctttcaatcataccgtcgatctccgcacggtgctgcacccggccactgttagtgacgaagcgggcgtccgtcttccactcggaaaagcctagtcgatcacacaacacgccaaaaagcctatcattgccaccaccgaagagaatatctccgtcgctggtcttgtagctccggtagggtacaatggatgctgggaggtgttagtttgggtattatacccaggagaatgttcgctgcttacggtgtgctgtgccccaacggccggaatccttttgcccactgataagtgcagagctagccaggttcgatagcgtagcgacttggcaatcactcaaacaggcatcgatgtgctgacctctaccagtccgaccccgagcaatcaaagccgccatgatggcattcgatgtgtataatccggtagtcagatcggtaacagcaacaccaacctttactggtgcaccatcccgagaaccggtaatgtgcatcaatcccatctcagcttctaccataacgtcgtagcctgcacggttgctatacgggcccgtctggccatatccggtgatactggcatagatcaattttgggtttatttcccgcagagtttcatagtccatgccgtattttttgagcccccctgggagatagttttcgactaggacatcgcattcctttgcaagcttgtgtagaatctcgacgcctgacttgtgttgaaaggatagaccgagggatttcttattccggttgacctatatccctgatcagtgctatgataatttttatatagcttcgagagaaggctcgtacagctaggtagtaagcgctctcgccagggccctttctggaagcatcttcgtactttgcatatggcggaccccaagcacgagtatcgtcgccgcgcacagggtgttcgaccttgataacttccgctctgtatttcgtcttgtcaatatcataggatcaccaattggagctgtttcatagctccgaaggttgatacataccctaaatcacccataatttgagtacagtaaggctaaaagcgtcagcttgaattacacagcctatcaagagatggactcacaccagccaaaacgcgtgtcatatcaagcacccggataccagccaaaggtagcgaaccatcgaccgaagctgcactggagtagcttcgtcctggcaccgtgcgccgcaaggcattgctaccccaggacaagccggatcgacgggcagcaacctggaatctgagcgcaaccgtcatgatgatatatacgaagagcggagcgaaacaaaaaaatgacgctcaaacaagaatccccgttaaatgaattctggggaaaccggcgaatctccgccaaaacgccgacgccgacaccgctcggaggggctgacgccgagggcacacggagcattttccttgtagatcatcaaccgcagctatgtttacaggtcttgtcgaaacgattgggagtgaggatatctttctctttgtaacgtgagtcaatcgctaacgtggttttactagctgtcacggccttggagcctattgacacctcatcgagcgggggcgggggaacgtcactcaccatctccgactgtgaggagatcctcaccgacgcacacctgggcgatagtatcgcagtgaatggtattttactctttcgttgtctataacacatgggatattgtctaaaagtgggctcaaggaacatgtcttacggtcactgcattcgataagacctggttcaaggttggctgtgcgccagagacactgcgacgcacaaacctgggttctttgcagacgaattcccacgtgaacctcgagcgcgccgtttcagccgatacccggatgggaggacattttgtgcaaggtcatgtcgataccgttgcggagattctgtctgttacgccggatggaaactcgttggtgttccgactgcagccgcgcgagagagatattctgcgctatgttgtggaaaagggctatgtgacccttgatggtgctagcttgactgtcaccaaggtcgtcgatgggcaggatggatactgggaggttatgcttattgcctatacacaggataaggtggtcactgcggcgaaaaagcccggtgactttgttaatgttgagattgatatcgtgggcaagtatgttgagaagagcgtgcagggatactttgctggaacctctggtggagatttcgctatcttggagaagatggtgaacaggatcgtcgatgaaagactcaagaaatagatcagagatacgaataccgaatctccgcaacttgacttcattgcaatattcggccaggacaagaaaaaatgagtcatttttagctttctatgtcctagaatgaactaatcggtacatttccaacatcctttgattatagcgaatacaaggcatacatctagaaattcgattagtgaaagcagaaaagcataaagcccgcaagtatatgcaagtattgagatcattctatagtcttagggtctatactcatcgtcgaggttggatagttcgacagacagcacagcgactctctgatcggatcaaaagcattactaagttcaatttaaggatggaggatgatggatgaatttgcaagactgcattatatgaagacaaaacctgaaaaacgcctatatgcctatcgggtatgtgacagtgacaagaaaattttggtccatatgacatggataagacgtgaagacggtgatcatttttgatacagtccactagtgtgatagacaagccggcacggtttgacttcttgggtttgttcaatcgcaagagccggctgtttaccaagcgatcaagtagaagctttcggaaaggtgtggtgtgatgactcgaagcagccatttactcctccatagactcgtccgaatcggcttcagagtcgtcatctgccgcttcaccctcaccttcagcgtccttgtcaaagtcatcatcgctgagccaatcttcatcatccatttcctcgtcctcgtcctcctcggctgcttctttgccactgcccctggccttggccttctcctgcttcttgcgctcaatgttcgccttctgcagcttctttctctgctctttctccttcctccgaacggcccagctctggtccatattccgcacctccttctcggatttcgtaatgaagtcatgccacatgatcttgccatcgcagactccatcctcaaccttcatcaagcgaaggcgcaagcgaggacccagctctacgagctttacagcccgcttctcaacaccggtggtctgggctggcttatcctggcccttatctgcagccttttggcgctgcatttcacgcttgtttaggactcggcgggtcgtgctctcttgaacttccacttcggcatcggtgtctagctcggtctcacttgctgatgtgtagcctgcagcggaggggtcaagcaggtaatcagcggcatcttcgagctttccaaggttaggaacggcggtcttcttcttgtcccggttccgaatctctttggggtccaggcgacggattcgtttcgatataccggtcttcttcgtggcaatggcgtagtgacggagagtcaagatatacgagtcgctgtctttttcggcaggctctcggttgagaagcatgacacggcggatggaagatagaggctgggtttgggggttgatgggagggaagagggattggaagatcgtagttgtgagggtctcgagccgcttcggcactttagaatcttcggttgcgcctggtgtggtgaagttgttcatgaccaagaggggcggtgtcttgtggtcttgtccgccacttttggggcgcttcatcgatctctcaacatccttgcacagcgaatagttctcgactttgaagtgaagggtaggtccacggggagtaacagcgagtcgcatatttgtgttaccagttgcggacttggaaaacaacataagatgagtgacacctaggggcccggtcataacggtataatctcgcagtctgttggatttgcgttcctaatattgcttgttagaacgaacgaacagaatagtgattgtgaaacataccttcaatcgcacagcggtatctggctccatcatacgacggacatccttaaccaattgggtcacactgctaccgacttgagaagcgcctattctaatgaccatagacttcggggtcttggccattgaggcagcgctgcccttcacaacagaagcattttggggcttctggtgagtgcgcttcttgacacgttgcttggccattttgatgtgagagataagaaaaataaaattggacgggaaaagcaacgaatactaaatcgaacagctcgaggttttttttttctccaaaaattaacatcagaaacagcgccggatcaacaatattgcggccccacattaaattatttcttttgagatagttgaacatcgacaacttcctttttgttcaaacacaaatcaaacatgccggttaccaagaagcgcaaggtcgcacacgcagtacctgctgcacctgttgaagacagcgacgttgcatcaaatgcaagctcttcaagcccccaaaccaaccccgatgttgaagatagcgcgagcgattcaagtccccaacccactgctgatgaccccaatgtcgaagctgcttcctccgagactgagcccagcacttccagcgctcccaaaacattcaaagaactgggtctgattgactcgctctgcgaggcctgtgacaaaatgggatacaaatcccctacaccaatccaatccgaatcaatcccgctggcacttcagggtcgtgatattatcggattggctgaaacaggatctggaaaaactgctgccttcgttttaccaattcttcaaggtttgtgcatatttgatgacatgtaccttgtatacaatactgacgagtcttctagcactcatggaaaagccccagccgttctttgggctcgtaatggccccaacccgtgaattagcgtaccagatttcactagcatgcgagtcccttggtgcaacaatcaacgtcagatccaccacgctggttggtggcatggatatggttcctcagtcaatcgctttgggaaagaaacctcacatcatcgttgccacgcccggcagacttctcgatcacctcgagaatactaagggcttttctctccgcaacttgaaattcctcgtcatggacgaagcagacagactcctcgatatggatttcggccctattctcgataagatcctgaaggtcttgccgcgcgagcgtagaaccttcctattctccgcgactctgagctcaaaggttgagtctctccaacgagcctcactgtcaaatccggcccgcgtttcgatctctaccagcaagtacgctaccgtggaaactctccagcaaacttatatccttcgtccttataaacacaaggacatctaccttgtatacctcctccacgaattcatcggccagtccgtcattatcttcatgcgcaccgttcacgagacacagcgtgttgcattcctgctgcgcggtctaggcttcggcgcaatccctctccatgggcagatgtctcaatctgcacgcctgggagcactgggaaaattcagatcgaaaagtcgcgagatcctggttgccaccgatgttgctgctcgtggtttggatatcccctctgtggactgcgttttgaactttgacttgccaaccgacagcaagacctatatccatcgagtaggccgtacagcacgtgctggaaagtctggaaccgccatctcctttgtcactcaatatgatgtggaaatctggcaacgtatagaggctgcgatgggcaaagagttggccgagtaccctgcgccaaaagatgaggctatggtctttgccgaacaagtcagtgcttcacagcgtgacgccattcaggcgatgaagcattacgacgagaagaaaggggccaaaggcaagggaaagttctcgtttaagggcaagcgaagtcgcgatgccatggaccaggaagagggctagaatttcattctggctcatttgctgttctctgtacatgaatagatggtctattttacgaatttggggcgtttaagcatgtaatttgaaagaacccatagatttcattactgcgtcaaaatgatatcgaatattttcctggaccatatttccggagatccataagagttgaagaggtattcgctgcctaaagccgcacaggctagtgtaataatttcaatacggcctagagaaacagcggtccctaggggcatttgtcagggccaagaatcaaatttggactagggaatctattaggcgctgcccgcctcgctaacagcgttggcgacgcgagtggcaaggtcgtccgcctcggagcggctggcagcctcagcgtacacgcggacggcatcctcggtaccactggcacgggcgaaactgcggcccttgttgtatcgagactgaagagactcaatagtgctctgcaggccagcgggagactcgagcttacgctcagcatcatatgccttgaaaatggaacggtcattgacctcgacacgcacgaggcgcgaaggaaggtcggtgtaggtgccaagccactctttgggtgaccagcccttgtgggcgaggatggcctccacaagaagagcgtcggacaaggcatcaccgacagcctggttaatcaggtcggtcagggcctgaaggctctccagggcgtgctgctgcgccggcgattgaggctcggtgttcttgatgacctttagggcattctcggagaaggtgacggtaccatgtccgttggcctcaaagtagacgccaacatcgaaccgcagtgcggcgtggtggaggtgcttcacgccggtgttggtgcagataatgggcagcttgaggaccttctcaatgtaatctgtgcttgcgccgttggcataggcggtctggacaacaccaattttcagcttcgaagcaattccagcattacgggcaagatcgccaatgaaagatgccgcaagggtggcaatgcggtccccgtctagaagacggaacacgttgctgtcgtcctggaagtagtaaacaatacgatcggcgtcaccgtcaagcgaggcacatcgatcgagcacggcagctttggaagaaggaggagcacgttgcttggtcttaacatagtcggcaccgcactaaatgaagtgttagtttgatcaaaattcgtgtgttgggcaggtggaagcatacatcagagttcagggcgtcagggttgatcacatcatcgttgacaatcttaatatcgattccagtgaggtacttcatcagttccctcaatttaggtccaccgacaccattggcacagtctacagtcaaagaaccctggaccttgactccccgcataaccttctggaaggagtttgcaagcttctcatagtatccttgctcagtcggctcgccatactcatattgtgttccaagtgtgttcttgcagcgaacaacataatgaagctgcggggtggtcatgtatttaaagtccacaaactcgacctccgtcgcggtaagcgcggcattcagaacgcctaccagacgggagccagaagcacgggtgtcacgagcgaagaccacacgagcggggttggtcatggtcacgtcgatttccttgacgagttcgtcgtagacatcggcgatcttatccaatggggcatttgccagttttgtcgcgtacgcctcccactcagcctagttatgacagtgagtacgtattccaaattcggtctttcagcgcaggccaatcttacttcaagcatctcgccctaaataaaatataaggttagacttgtcctaatagggccggttctatggcagggctcaatgggttaactcaccatagggtcaaccaacttgacaccattgtcctccgcggggttgtggctagcagtaaccataactccaatccattgtccgctaagcttcttcgaccgcaggcttgcaagcaagcccactgcaaaaacaacggtgttgaggaggtcactgcgcagccagattggtcagaacaagtcggcgtcaacaaaaggatgatcgcggggttctagagatgtggaggcggagtggatcagccatgtttgaagaaacttacgctttcatgcgaaactataagggagagaatgaaagttagccgagtcgctagagtaggatgttcatacaaacatacccctgctgtgccatacccaaataccttgccctcgggctttgtgtattgcaacgccgcatcggtgattgctttcttgacagccggagaggccatggcgcaaatgtgtgattagttataaagcaccgtaataggtttcaagagaagaggcgcttagaagcttcaggtaaagtcgaagtcgaagaagaggggagtactcgaaacaaaaaaaagcggctgaggggtgagacatggtttattgcgacggccttagcggtgagcgaaaggtggggaaatacagaccaaagcacggcaggggacgtggtaataatataattacccgcattagacgccgtggaaattaactgcaacgaaaaacattctggtggggagcactccaaccttcattactgctacctccacgtctaagctacagtcaagcatgacatattagtatgtctatgctatcctggggatgtatatctatatataaagatcgccgaattttgccgaattttgatcctcttcatgccttgagcctatgcgccgcaatatcgtcctgtgtgtccctgatcaggaaccttcgggaccaaccgatgcattagtcacgaaaacgtattgtgtcgttggaacgtgggggacttacgaataccaccacacagcggggaccactgtacccagatgccagaggctgtgcgcgtcaatcaacccattccaaggggggaagtcgagcagctccaaactcatagccatgattatccacgccacaatcataccaggccaggcggtccaagacttcaaatgtttttggtatcggaagatactgaatccggtccacataaggttctggataatgccaaccactacgttcgctatcatattgtaggtgtagtcccaagaccaaaaggtaagataagacacgtgcaatacatatagcagaacgcagatagcagtccaaagtcgacgcagagttggccgatatggaggattttcaaggtccaggcggaggattcgaatgacggcaaggtagagaccaaacagcacgttggcgccagccgcccaatagtccagtttctcggtcagggggaaatcgcgcatgtgaaataacatgctgaaactccagcttgcgagtccaatgtatccaaacatcatgtagtatgggcgaagtgagtgccaactggggatcgactcttggatacgggacatgccgtgccagtgggcggcgaagttgaagaacgagaagagcaccgagaagggctcctgcatccctaggagcctacggaacggccatttcccgtggaattgtacaatcgggctgatcattggaggatcacgcgaaactcgacggtcggtaatgacatgttgacaggtgtagtcacattcagcagggcaggtccatagtagcaagcggaggtgcagcgctaaatagatcagcaaaggggaaacgcggcgaacggttggaacaatgatttgacatacgtagcactgaatttccgtgctgacaattttccgttttacagacctatggttgttagtcgtttccaagggtctgttggtcgcgggagtcgtacctggacacattctttgaagtcggggaggtggtctcctaatgacgcgttggacctgccaatgagggaggctagaaaaacgagagcgaaaagagtgtagagattcacttttcctacgcccagattcattgtgggccaaaagattagctccaaggtcttaggcgttcaacgcgtaagctttggggaagaatgacaggtaaggcggagctcccggcatcgaagagcctccctcggtggtcttggcaagatcaaaccagctcttttgtttaccccacagcgacatcattgatctactttattcaacttcaatgaatgtggaattggcattgtttatcatccttgtcaaatcgcgttataacttggagatcttggtagttcactcgaaaggaaaggcagggccaatggcgcaagtaatctactttgaatattagatatcgtcaattgatgctagttatccttgaagaagcgctattcttcacatagatgccattcaaatagagtgcaggtatgcattagtataactacgtagaactccgtacaatatagctgtacaactatgccacgcagatagccctatagaaatgagggcaagtagtgtcacgtgtgtcacgtgcgtatacacgtgatctcccagtacggctagtgcgggcggggattggagttaagcttggcgggcgggcaaataatccagaaaaaaaaagttacggatcgatctctgttggacttttatctttgacatccttcctattgacattttttttactcttgtcgattcttccttttcggcccgttctttttttcgcacagtcaagatggataccggatccgatagccctcagggcatcaccagcagtgctgatcgcatggttggcatggagcactctgaagtccgctacttcactaggtacgctattctccgttgattgggtatgttggaagttgatgctaatacatttatagttacgaccaccacggtaaattatctcgatccgtgatagcgaaatttttacgtgctttttactaacggtcattttttgggctgcaggtatccacgaggagatgcttgtaagtacaaatacactggctagttgactatttccagtctctaactttcattttctactttctagaaagatgatgtgcgcacacgctcctaccgcgactccatctaccaaaaccgccacatcttcaaggacaagatcgtcctcgatgtcggctgtggaactggtattctgagcatgtatgtatccgcttgattaacaacaccgtgctcttagatatcttgttgactgttttgtttaacaggtttgctgctcgtgctggcgcaaaacacgtcattggtgtcgatatgtcctccatcatcgagaaggcccgtcagattgtcgatgtcaacggactgtccgataagatcactcttctccagggcaagatggaggaagttaaccttcctttccccaaggtcgatatcatcatctccgagtggatgggttacttccttctctacgagtccatgttggataccgttctctacgcccgtgacacctacctcaaccccggtggtctgatcttccccgataaggccaccatgtatgttgctggtattgaggatggcgattacaaggatgataagattggatgtaagcaacaagtctaccctgaagctgtttttcttcgacgtactgatcattttcagtctgggacaacgtctacggatttgactacagccccatgaaggagattgctctcaacgagcccctcgtcgatactgtcgagatgaaggctcttgtgactgatccctgcccgatcatcacctttgatctgaacactgttaccacggccgaccttgcattcaaggttccttatgccctcacggccaagcgccccgacttcatccacgccttgatcgcctggttcgatatcgagttcagcgcctgccacaagcccattcacttctccactggccctcacgccaagtacacccactggaagcagaccgtgttctacctccgtgatgtcctcactgtcgaggaggatgagcgtgttaccggctgggtcgagaaccgccctaacgataaaaacaagcgtgacttggatatcagcatctcgtacaagttcgagacccccgatgccacccgcgctgctgagggtggttgcttctaccgcatgtaagttcttgtgctgttttgctttggttagttcttgaggtcattatactaatgcatcgtaggtgttaattttcttccacttttctctaatttgatgtcattgggatgtacaactgtacgtttgcacggtctaagtgaaatattttcgtctcgcaatgcatcctggcatgggcatgtatgaaattgcccgaggcgaatcggacatctggtttcgcctttgtttatttcggcgtttaattctcgggaggcaggaaaaaatgcattttgtggcgcgaacggagggatataattctgaagctcctcgaatttccaggtagatacccgagtcgatgcttagtctagcaaactccaacgctcttcttctggacatgttttccacgctacgatgtagacgacaccattggttgaaaaagctttcagcgacctaacagaaaagaatataagatctgcagggggaaattgtgccaagaagaggccctcatcggcaaacccacggcaacaaatccaaagaaattatcagatcctcggctccttgatggcccccgcaattaccggagctactttagtgtgccatctcctttattttcttgatttcccttacccttgaccctcttttttttatctgatcttatattcatatctccttcgtactaccatcccaatgtcggcccctggagctggtcacgaattccccgcccaagaggtttcttggcagaagcgcgatgtgctattgttcgccaacagtattggtgtcaaggccgatgagctgcacttcctctatgtatgccacgagccacatatacactagtctaaatattattctaactggtatccaggaactccacccgaacttctcggtcttcccaacctattctctcatcctccgtatgttgatcgcccaaggaatggtcgggcagcactaactccaaagctattagcattcaagctcactgatcaggaggtgactgatttctatgcccgccaaaaggcagttcacattccaggcgtccctgacctggaccatcgtcatggcgtcgatggtcagcgtaagatcacgatcctgaagccgctccctaccactagtgcagggcgtaagtttgagctacgcgataaggttattggtgtctatgataaaggcaaacctggtactgtgatcgagaccgagcagtctattgtggataaggagagcggcgaggtctacaccaaggtcgtgagtagcggtttcctagtcggacagggtggctggggtggcccgaagggtaagattatagttcccctatccagcatagagtatcaactgacatattcgagcaggacctagcaccgtcaactatcccccgcccgagggcagggctcctgacgctacccatgttattcagagcaactctgagatagcccacctgtaccggtaagtactcggtgcaaacagaattcggcttgtatacttgaaacgtctgatgctgactccttgcccagtctcaacggtgactacaatcctctccatgccacaccagagcccggcaagaagatgggctttggaggtattattgtccacggccttttcagctggaattcagccgcgcacgggattctgcgtgaactcggtggtagcaaccctgccaatatgaaggagttccaggctcgctttgcctcgcccgtccggcctggtgataagcttaccactgagatctggagaatgggcaatatccaggatggctatgaagagatccgctttgttactaagaatgacaagggtcgggttgtgttgagcaatggccgttgtctgttgaaggtgacgggggcgaagagcaagctgtgattgattatgccaaagctcggttcaatggcatgtaattggactctaaatacatacctaggtatatagcaaataccttctttatcaccacgtgccattttcgtagaaagtgaacttattgatgtccgtatagttccttatatatatatgcacgtgaccgcaacctcggttgtcccaccctacaaaaattggccaagcactgctacatatctcctcgttcttgaccctcccttctttctctataccgattatgagcttcagttggcgcacagcgctcaggccgagtgggctgtggagtcgcgccgggtaggaactcccattcatgtcgaattgaacgttcaacgctgaaaccctctcggattagacccaagagcctgagaccccgctattcccttgttagtgatttggtatggatttagcacatcatttacacccgagtcgattacaaaaaaaactaactcgatctctctgttctgttgttcatagacaactggccaccgacatgtcactggttcctccagattgctgaacaccaagatggcctcgaatggccctcaggttgcttggtctaagtccgacatagtaacctttccaggtaaggatagaaaggatctggaaatcccgttaaacttgtaagtttgttataagtccaaggaaggtgaatagcagctgacttcgattttgtagcggtctttttttcctcaggttagtgaccaggatataaaagcagaggcttgacctccacctcttattgacaacttggtgcccacgactagagaaaactgccagtgtcccaaatgtattcatccggatacgatgcagaggataagcaacactttctcggtaggaaaattacggctccttgtgattacttgttatctaatactacgcctacagattccgcaaaacgtcaagatagaatcaatcgagcacagtgacaatatggtcaagatcaagtgtgagagacgacatgcataactttgaattaccatcagaactaacaccgccacagggtctgataatcacacgggactttattcgtatgattggcttcgtgcacactcgcaggacttatctagcgttgaaggaaccaagtcggtgccatatcctcaatcggcattgcaaagtcccaggtaagttattcaaagccaaagaaccagagtcacaggattatgttaacaccatggaaggcatttcaccccagtcgtggattcagatcagagtcccagagtcaaatatgacgatgttatgtcagacgacaaatctcttcaaatatggctgagccatattgtaagcccttctgtcttgactccttgatcaaacttgctaacaattactaaagtgggatgaaggattctgctttgtagacgacgttcctatcaacccagaggcgacccaatctctcatcgagcgaattgcgttcatcaggaacactcattatggtatgtaccctagatcaacgattcaccaatggctcattcagctaacatagcttcaggtggcttttgggacttcacagccgatttgacttttaaagacacggcatacaccaacgaattcctcggtgctcatacagacaacacttatttcacagatcctgcaaggcttcagctcttccatctgctatcccataccgaaggatctggaggagagaatctcctaattgatggatttgcagccgcaactcaactactccttgaaagtcctgagcattatgcccaactggtaaagcataggcacccctggcacgcaagcgggaacgaagacacctgcatccaaccatccgccatggcaccggtattttcgattcatccggatctcaataaaatgtaccagatccgctggaataactatgatcgtgcaccaaagaccaactggtcggcatcggaacagaccgaatggcaccgcgctgcgcgccactataatgagatattgcagaccagagaagtgtggacgaagctacaaccaggatcggcactcagtaagttctttgtgccattgtgatggctacttcagcttacatattttgtcttagtattcgataactggagaatgttacatggtcgctctgagtttactggaaagaggcgaatgtgtggtggctacggtatgtatttctgatagcgcctgttaatgattttgtactaacgaagtgccagtcaacaacgatgactacatttctcgacttcgcctgctcaagttcggccggaaagaggtgctggacaacctgggcaacgttggagacaatccccagaatccttattggttcatctaggttctgtggtacctgatgcaagataaatccacagaaaatcacattgtataaagcaaaagtgattcaagtacggagtaactagatagaatcgaatcgcacttgattataaacttagatcgcatcacgtgatcctctatggctgacgttgttggagctcggccaccgacagctcttcctctttccccatcttccccccatcctttccaatctacccacctactgtctcttcatttccgagctttttaatttagttatctcataattcgcaatttctcgattccgccatgtcgactcttgaggacctcgaagaccttgagcaggagcagagagagaagaagcaagaccagaacgatggcgatggcaagaagcccgaaggtgacggcgatgccgacatgacagacgccgataaaaaagacgaagaagaagagatgctggacgaggatatcttgaactcaagcactgcagacattgttacgcgacggcggatgttggagaacgagatgcgaatcatgaaaagcgagttccagcgtttgacacatgagcagagcacaatgagggagaaggtgaaggataatcaagaaaagattgagaacaacaggtgtgcattcactagtccccgtattcgctgttctgcaagcccgcggagctcggtggccggcttgcggatcggcgaaaagacactttaatatcaacagtccactgacattttcatttgtgactatataggcaactaccataccttgttggaaacgtcgtcgagctattggaccttgatgtggaggcagaggcagcagaggaaggagctaatatcgacctcgatgcgacccgtgtaggcaaatccgctgtcatcaagacctccacccgccagacgatcttccttccgctcattggccttgtcgaccatgaaacgctgaagcccggtgacttgatcggtgtcaacaaggactcatatctcattctggacacactaccggccgagtatgacaaccgcgtcaaggcaatggaagtcgacgagaagcctacggagaagtacacagatattggtggtctggataaacagatcgaagagatcgtggaagccatcgtatggcctatgaaggaggcagagcgctttaagaaaatcggcattaaggcccccaagggtgagttactttcctccttcccctgtgcttcaaagctaacattcattttccttcccaggtgctttgatgtacggacctccaggaaccggtaagacacttctggcccgtgcctgtgccgcagagacgaacgccacattcctcaagctcgccgggccccaactggtgcagatgttcattggagacggtgccaagcttgtgcgcgactgctttgccctggccaaggagaaggcgccctccatcatctttatcgacgagctggacgccattggtacgaagcgtttcgactcagaaaaatccggagatcgtgaagtgcagcgaaccatgctggaactcctgaaccaactggacggctttgcatcggacgaccgtatcaaggttctagcggcaaccaaccgagtcgacgtgctggaccctgccctcctgcgctccggtcgtctggaccgaaagatcgagttccccttgccgaacgaggaagctcgcgccaacatcctgcagatccactcgcgcaagatgtccgtcgaggacagcgtcaactgggccgagttggctcgcagcacagacgagtttggcggtgctcagcttaaggctgtttgtgttgaggctggtatgattgcgctccggaagggtctgagcaagatcggtcatgagaactacgtcgatgctatcgctgaggtccaggctaaaaagaaggataccaacatgggcatctacgtttagagtagacggttttcctttttatgtcccgatccatacactttctctgctttgttgcctctttgttccgagtcatctcgtgtatgtatgctccctcggcttgaatggaagccggtaattcgttatgcatgaatggagaattcttattacgattttctttatatctccgagtaaatggcacttaatcttttaccatgccgtgatactctgtggcggagttgtactcgtagacatagatattctgattaaagtcgtgtttgatcactggcattgtggcgtagaacaataactgccactataaccattgatgcatagtgaataccacaacagcctagaaaatccccaagaggaaaaaaaaagataaaaagacacgcaaagatgcaatagtcataaatccataccaacaaccgtggctcatcacacacacccgcacaacttccaccatgggttttatataaaagaaacaggaaaggagttagaaaaggagaatccaaagagtcaaagacaaagaacaaaaggctccctaatcagaaagccgccagttccaagtctcaattcttaccctgggtatccttgagagtaacaatgcgattaagcaccaacttctcatcagtcgactcgcgatcgacagcaaagtacgcaacacgcattccctggaagcgaatcgagtgcttgtgctcacccggctccgcagcaccctcctccttaggccacggcgccgagcgggagatatcccggattccagtctcgaccatggcatccttgaagatctcctcggagtccgggttgatatcggcgaggaaaccggccgggtgggcagagggatcctctgacttgaagagcgagttgaaggcgcggacttcggcgcggacggggctgttgtgcgcggccgactcgccgatccagtggatgaaggacttgggtttcgtgggggcttcgccttcggcgggtttctcgtatttggcgtgcacgcaggtgacttcgccggtggcagggtctgtttcgaaggaggtcgccgtgatggggtaggggactttgaggaggccgacggttttgccgggggcgaggcggaagtagtctggtgagtcaacggcgcggaagtccgagcgctcgatgtagacggtcttcgtgaaggggatgttgtgggtgccgaaggctgggtctttggagaaggggcagtcgatgagctcgaggtggtcttccgggaggtcgtcgatgatgaccttcagcggctcgagaacgaccatcagacgtggcacggtggtctcaaggtactggcggacgatctgctcgaacttggtgacctggacgttggtggtgttctttgttacgccgaggtcgttgacgaaggagaggatggcaccggggggcacgccgcgacggcgcagtgcgatgagcgtgtacagacgtgggtcatcccagtcgcggacatgtccttccttgacaagctggatgatcttgcgcttggagagaacagtgccggtgatgttaagacggccgtactcgcgctggttggggcggtagacctccagcttatcgcagagccactcgtacgagacgcgagagagctcgaactcggttgtgcacagtgagtgcgagatttcctcaatgctatcacacaaacagtgcgcgaagtcgtaggttgggtaaatcttccacttgccgccggtgaggtggtgctgcttgtcctcggagcccatgatgcgccaggcgaacagatcccacatctgcgggttcgggtctgtgatatcctgcttcatgcgcagagctgcctcgcccgccttgtattttccgtcgcgcatggcacggaactcggagagggactcctcgatgggtcgtgtacggtggctgcatgagaagcgttcaccgccgcgctggccgccctcgatctcaccacgctgggccttgatctcggacttgttgcaatggcagacgtatgcgccatcacgcttgatgaggtcctctgcgagctcatagagacgatcgaagttatcgctggcgttggtctcacgcacaggtgtaaagccgagccatgtcacaatctcccgaatggcattgtagtaccgctcctcctcgccttctgggttggtgtcatcgaagcgcagaatgcactccccaccgtggtactttgcaaatccaaagttgatcgcgatggccttgctgtggccgatgtggaggtatccgttgggctcgggtgggaatcgcgtgcggatcttgggcacggtctctgaaaggggcttttcctggtacacgtcgtgcaggaagccgaccttgaacatggcttcagggtcacggggtgcgggagcatccttggccttgggtgcctttggctctccctttgatttgggctggtcctgtcttgctagcttagccgccgccttcttagccgctgcggcctctttcttctcctgactcttggacttcttgggtggatctgtaggctcggtggcttccttgggcctctcaggcaggtcgacaggctttgcggggtccattgcgacggataacaattgggaaagcgaaggtgggggatatttttttctcacgaggggctctttgtattcaatgcttatcagttgacattcgcttatcggtccgattcagcccgggatgagtcatcttctatactgccagagaataccgacctgggcccctggatgccaagtgactatgcatagggcttcagggctatttttacatataatgagtcatttcatatgcggttcaattcttaatttgtgatcaatactgtacaaatatgatacaactatgatacagggagtacgcagactcaaaaaagacagaaagaagcacagtgcacattaaccttccaccgatgcgccaataatgatacaacaatgaaagacagttcgaatgaccagatccaaagcataccggatcattatgcaacgctatccccgtacatctgacacagcaatgcgtgtatcatgaaccctgtacaatgagataagaaccagccaactaaatgatcggaatgaaataagaaaaacaagagataagaaaaagagaatacaacaagtgtggggtatatggcgcagaatatgtagacaagaaataggaggaaaaaagggatcaagaagtagaaagatcggggtcagaaaagttgtttaatgtcaacgagctctgagttgcccggacggtcacgctccatatggaaccaccagtcccggcccgttttgtggttccaggttccagtgcaggtatccttgtcccaaggcaaggccgagccctgtacactactcataggcgtgcttggagtcgtgggtgtcgttggagacgtacccatcacagaccgcccacccaagcttccccagccaaacctggaaatggtggatgcaggcgacatgatatcctcgggaggtgggataaaggggctcccgctgccgaagcagttgacgcccaccccagcagcatacaacagtgactgattcgaggctagcaattgtttccacccaatcaagccaccgtctgcctcctgaccggtgatatcaggacggaggatgaagtgaggaattgatgcgcccgttgcaggatcgcggaaaccactacggcccatcaaggttggcatgcggaactcgtagaccgttttggggccgctgcagtcattagcctcatctttaaaccgctcgcaggcagcccagatcccgtagtcatccatttcctgctcgggctcttcttcgaattgggagttctgcgcgttgtccggcacatacgtgtccgagtaatcttggatcagaacccgcatcccggcctcagtgtccttagcggccatgtctatgaacgtctgggcacgaattcgggctgaggtcagattatttcccgccggtagagcgagcggtcgagtattcacggaaccgtgggagctgcggggcagactgtaccggtctggtcggagtaaggcttgtccctttaatacaggccggcagacagcctggagggcacctgggggttccacgtcgcagggtgcgcggagagcttccagttgagggaaaccagcggagatgatactttgggcaagatgatagttgggggtattggagggttttgtgggtttctggaaggggagggtatcaagctgggtgagggctgtgcctgggtctggacatgccacatcccagtggaggtattttaaagtcgatgaggccaggataggctggaagaccatatgtccgtctggcaaagttggacacttttccgtctggactatcttgaaccgctcgagtcctcgtagtgacgcgaggagtttggagatgactagcagtgacttgatgttctgctcgactaggacgagtgtcttgagggagagtgattcgggtcgcgacgtgtactgtgaaagaccagcatctgtaatcccgggcaggttctccaaccttaatgactccaagggtggcagacacatcaatgtgctattatcaaaggagtctttgttgaaagaggtaatgcaaaggtttcgcaatgagggaaggagattaaagatgcgtagggagatgctaggttccaatgcgccatttccgttcaatccataaagcatcagtgtctccagatttgtccacgacgtatggtaatccagaaactcgaacatttgcgaaggacccagactcccagggcaggagtcgtcgcgcggagatagctccggcgctcgtgcggcctcgcccaaaacccatgtgtgctctttgagctttttccgggtcgacaaagcatgggtcagacgatcgaattcatggtgatacggaatagacaagcctaataggcgctctaagttcgggcacaccataaccacggacgcgaccaggtctcgatactcctgccactgggtaccttgtttcatggtaaagagcaaatctaattggggcacgcgtagttcgtatacaaggttggccagcaactttcgttcgcggagggttcgtctcaagagcttcagacgactccctcttttgaggcggtatttcttgagttgagccggagaatcatttccaacgatgtgtatactgtgatatctagtatggtatgttcagtcagcaaacactctttggacttcttcctaaccctgaattaatcaagggggctggactcaaactcacagaggtcctctaacggccttttcccaggaccgacaggtcaaggccaaggcgtgtaaatcgcgttgaaaacacgtcgtacatcctgtctggtgctgccctttgtgcaactcttctaaatggtggattatcacttcgtagacctcgtgtggtattctgcgttgaattggctcggttaacttgggaagggaattgaccgagtcgcattgacggtaagatgaagccggggacgatgggggatatgtggtcggcgcggttgacgcggtatagttggttcggtaggaggataccgaggaggttcgtgaatgaacggcatcgtcgacatgattcccggggatggaattgtaagataccaccggggtctctgttctaattgcgacaacactcattgtgaatgtgatctggcatcggagcaaacgacgcgagacgggaaaaagcagtgtaaattcccaatagggaggtggaggggttcgggaatgtagggaattcggaagatggcgtaagatatggagatcggcagattccaaccgtttttatatagtcacacaatacacgtattgagcaatccgatcgagaaacgaggcgaagagaaaagagaagggaagaatcataagggatatgtgagaatgaaaggatcagacacgctctaagaactagcattggataatcaaaaggaaaaagaaaaaaggacaagaaaagaaggaaagactattgtcagtcgatctcccccacatcagggaatgagttgaaggtccttacccgtggactccattcagactgtaagccgtgcagcatgcccaagtgtaggagcggagacgggaagaggcggttcaggggttggccctatgatttttggtacagccggatgtgggaattagacatatgtagtgtttatattgtacattactacagtatagaatctttgaatatctaaaatcaagaactgcaattctctgatatccctacaatacatccaaacctccgtacacaggacacgccaaggaacattgaatatcaaaaacgtccgagggttcgtggacgtgaccacgctatggctccgttaggtttagcgcgatgggtcggggcagttttagtccggttaagtgcattttaccccttttccgtgtttttcttttcttttctctttgctgttggttatgttgcgcgccgtgatgttattacatgtatcttattatctgttatctcgctatctcgttgcttttatccccatttagaatgataacactgtaaggcgtttcagtttatattgttcccaggttatcccctttctatatctaaacggcccaagcgcatatcatcctgcaggccaatggaataggcaattgggcggggacgccaattcttacttttgacttcggctttattacggagtacttcagaatggtctgcgcgtcactgcatggcataacgggatcgacatatatatcacttttataattatcagcatgctcccgaatataaccactatcacatagtctaaccttggatcgtacatgttgtacctattattaaacttaaaaaaggcatggttcgactcaatcccctagcaacaatctcccgggacaatataaatagcaagatcagcgaatcggtcattcacatgtaaaagactcaacggatagtacggaggagtccatctacataattccccttgacatgtaacaatgtatatgtctgtatgcgctaaccaaccaaaagcggaacgctcggctatgtatgtatatttcaatccacttcaacaggtcggaacatggaagagtctcacgactgaaactccgatctggtggagacactctgagggtcctaagtccaatacggccaattgcaccaatcgatcttgttgcgctgacgactagggcttgatagtgccactctcggggtgttcctaggttcaatgcaatctcccgtcataccatggaatatagcatagacaattaggggtggatattcggtagctgtgagagaacacatgtcgtatgatggcaacggtccttcacggagtctgtaccgagctgctccataataactaactatatactacacagttagtcactaccttggacgtggttcggacggaaagatgacgaggcaagccaagatgccgccgacgccccatacaagcgctattccttattgtcgagtagaaaggctaggtgtcattcaaaggaccttactattcagagcacgtgagagcatctcacacccatggacagaccatggagaccagtacatggacgagaaacactaatgactctgatacgaacatcaaagtttaaatgcatgcaagggaggggctggatctagatagtgtttcctagtgctgtgtacttgtacttggtgtttatatttagcatcaacctcaaaccctcacagtttcgccttcgccgtctccttctcatcccccctaaagcgataaacaacatccccaaaactgcccgtaggaaaaacataataccacctcaactccacagtcccagtattaacaatcccatgctcggcatccgaaggaataaagaccgtactcccagcgcgtactttgctcacaaccccgtcgatagtcacatcgccctcgccgtcaaggatatgatatatctcagcctgtgtgtggcggtgcgcgcacaggtggcctgtcactggggggcaggttgctattcctgcgcacaggtgtgtggactctgtttgcggggatgagattaaggtgtgccaggatatatcgccgtggattggggctgggaatgtttctggcgatgttgtttgtgtgtaggtcgaggggaggattgttggttttggtctttgggtcatttcggtttttggatatggatagactatagtgggaggtgttgatgtggttctggtttgcgggggggagggtttataatttatcttctctgttaggttgcgccttccatatttacatgtgttaggtagttctcaaacggaagaaacgaggtggggaaataggaagtggcagatgtagaaggagcgtggttgtcgaggaaacactttcctaaaagagaaagtacgtcccaccgaacatgacctacactccgaccttggaaggctgcatgcattatgtgcctaaaacagatcgcgggataagaggagcagcagtgataggaaagtatcgcaagtaacaaagaactccaccgctaatggatggattatatggaaaaatctgacattcgactagaacagcatatccgtactcccatgcaaatgcggaagcagatcgagccccataagacaccgatgccagtctgaacgccatgcaaatggacctagaatgaaaccttctgctacaactcggttatcctcgaatctgcgtagcttcaatcaacctggacatgcaaagaaaaagaaaagccgtgaggaaacatcctcaaattatcaccgtaccgtgctggaacagaaaactccacgaagagcaagcaaagggagaagcaggaaagaagaccgaaggaaagaccggagaaaaacgtgcaggtatcgaaattcaggacatcaatcccagcggatagagaataaagttatcaacactgtgccggagacaggatagaagacaaagactaagagaggtcgctttgactaatcgccccagaacatgatgactgacaataaaggtgcacaatgaagattacccaaacccaactccaccaaacacgcaagaaacccccgggatttcctctgaaactggacatgaagaaaccgaccgaaaccccggggagagggggggtatgtgactgggagccggcctaggaaaccgacaaaacaaacgagcaggttgtaaccataacaagtagcgagtctcaagattagtacctaggagtggtcctacgatcaaagaatgatcaccatctcaacccggcgtccgacagaacagtaaacagactgaaaggatgaaggaaagaaaatgggggcaaaatccgcagaaacaccagcatgagaagggaacgggaatcagaaacaagacgacgacggtaaatgggaattgaaagggaaagggaaacccatatttgcgggttggaagtgatgcaatccgaaggcatgtacaagacaagacaaagaaataataatgtatgccagatcaagactccattatcatgcagtaggagaaaaaaataaaacatgatcacatgtcggtatcgtcaacgttgaaaatcccgggttcggtgccgtcgtgcgtcttctggacgcctgtcatgcgctggtcgaccgagttgccggcacggtggcctcgtcgccagtgatcgtcgtgcatggagtcctcttccatatgatcgctgtcgtccataaggtgatggtctatagaactttcattcacaaaggtgaagcccttgaaattggcttgcatcccgggggataagggtgtggaggctggcatgaggccgttggcgagattcgcggcgcggagattgagcgagttgttcagctccatagcgtttgtgaattcgggatcgaagttcgatgtgtcggtttcagactgcagcagcggcttgaacggaggaatcacttccttgcggcacagcgtttcccagttgatgtcgtggaagaatgggtgtgccatgagctccttagcatcgccattggcgccaagacgatgcttgggattccggttcagcagacccttgacgaagtttcggccctcggagctaagcgcatcacgggggaaccggactttgccgaatgcgatattcttatacatctgctgagtatcctcggcgtagaacggactccagccacagcacatctcaaagaccaagacacccagggaccagaagtcaaccatcttcgtatatccttgctcatcgagcaatacctccggagccagatattcagtggtaccacagaaggtattggtggtgtcgttttgtgacaggtttgccttggataaaccgaaatcgcagagcgcaatgtgaccgttggcatccaacaggatgttctccggtttgagatcccgatatacaatgtcgtggtcgtgcagatgttgcagagccaggatcaactcggctatgtagaacttcgcccgggcctcctggaaccgaccctcacgctgcaagtgccagaacaattcaccgcccgacatgtaatccgtaaccaggtagagatctgttggggtttggaaggagaacttcaatcctacaataaaaggagaggccgtcatcgcggttcggactaagatattgcgctcaccgagcgtgtgtatcacctccttcttctgaatgataaccttctttgagagaaccttcatcgcatagatacgctgtgtgtccttcttcttgacttgatagacctgtccgaaagttcctttaccgatgagtttgaggacgaggaagtcatccggtccgacctgcttccgatcagtcctttcaaacttcatatcgagatgaatttctccagacacttggctgtcgccggcaccgcgcgcgaccaagggaaaccagccttctagtcggctgtgatcctccttgaggttgatgcagaggcgtacgtgacccaagaaagcttcctggttgttacggtcatagactgtgacatcgagttctgattgatctcccataacatcacttgaaagaacgtgttagtgagtgacacaagtgaaggagttggggtggggtaacatacaaggtggcctcgtgatcccagtgcgggtctgtcacgggcgtccgtcccttgtgctcaccctcgacggcactgttgtgagagctggatcgggtcttcaacggaatagccatgggccgaccagcagcctcctcggcatctgactcctgctggcgcagtttcttttcctcctcgccgtcgcgagcacctttggagatgtactcattccattcgaatacacacaccacatatgggtcgaaacttggtcgcagtcctcgaccatcggtgatcttcaaaaataatttaccattgatcgggcccgtgggtgcgccgttggccggggatgttgatgttgcagccgcagccgcaggctcggcctcaggcgcaatttcagactgggactggggtgggaatgcttcatcgagtttcatagtaatctcgtccgtggagctttccatgtcttccgactttgactcagactgtggggtctcttgcgaggtctttttcggggcggaagtggcggtcttttcctgggcggttgggagctcgttggacatggcccggggagtaagaggtggggtattcttaagacgcgacccatcgggtgcgttttcagttagcttggctaggttctcggaagatatcgagacatgcggtttctcatggtcgaggaggggagcttcagtcagggaagaggcatctggagggagggatggattgcaaaaatgggtggcaagaacggggtcgtcagagatactggatactgggagggaggtttgacggcgggaaggagggtcttctggaggagtttgtgtgggtgaaatgaggtaattcttcagcgttgtaaagatagaagacattgctggactcgtcccgaggtccatctcatccgaatcatgctgtaacaaggagtgtggaggggtgtgcagactggggtgttcctcatccatcttatcagacccatcttcccgctccatcatgacaaaagactcggatgaatcggaggagtgttgcgtgtgcgcatttgattgaagggtctcagagggtttcgacagacatgaccataaccgcggaagactcgctttatcaccggagaaagaaccaacctggaagtagttgtgcataatggaaggcagacgcttatcggccggatcgggctcgggtgttgcgattcctgtcggcgtgggggtggaatcaggcgacccaatctgatcttgggtatcgtcttctagtccggagctatgagattaaaaggtcagtcatgagaaatgccagctccgatataatctgcaattccacaggctgtaggcaaattccgacaaggtccgagacgaaaggcgaagcaccaagactttaagagaaagccagcatcctcgaaacgccatgtttcatgcaggtcaaccctaacaagaacagactgtaatgcaatgcggtgtgaggggatcgtggaccctctttttccctccttcaaccccgcctttcaaagggaatgccttgagtcaaataagagatataggaagttgactcacttcattgtcttcatgtcgtcgccgtgcaacacgggtccactctgcgcagccattgtgtttccattcaagaacgtcgaaaaatgaagaggaacaagaagtgggggtaaaattgggaagttggaaagaaaaaaaagagatgcggattttttgatgagctaagggagtttgcgggatgaatttgaacccgttcggattttccccaacaagaaaatgaaatcgggtttatttccagttttattcgatttgggaggtttggaaaagaaaggaaaaaaagatgttgatttggtagtttttggatttagaagtggaattctctgcggtaatatagaaccccactgaaagatccttaaagggttctcactgatagtccatgtttccgagtgtattatcaaggcacgtgtaagaccataagaatataagatataatcttatgggataacccagctgaatgaagctgatgctgactataaggcaaaggtttcgaaaaggactagaactaaaaaaaaaccctgcaaggacattgacgccttcttgtattctcgaataatcccgagccatccacgccttgtttcccgattcgtactatatctcaagagggaaaatgaatgagaaatgaatcagagctgatattattattagaaatcagaaatcagaaatcagaatggaatattattaggaaaactaacgtcatgtggaggcccaatttgctcaatagccctagatatcaagacctcttcgtctagtctttcccttctgattccgctttctagaatgtgaaggaaacaagattatcgcactttcaggtcacggtccctagtccgagtgacattaggctcccaagaacatgtggctacacccttttcacaagatgttgagtcttatcgcgcttcgaatctccactcacagcggggtatctcgttcattcttgcatctgatgacaacatcggagtatacgaagtagcgacagaccgctttttatattcggatggtttccgtgttctagtactagtacctatatatatgactcaaagccggtacgcttagtctatacactaccctgcttaagataaatctcttgcgattcttttgcataaaataatgaactacaattaactctgaaacccaaagatcgagaccgtgacaatctttcagctttcaatatggcccgggtctagctctcagctcctcttgcatctacatacataccaggtgaattgtgagatatgctgtggtcggcagtgggaccttatgtacggcgcgccccgatgacgcatgtggaggccttagaggatcccagtctttgcgctaacgtgtggttcggtggatttaagacccgggtcgtgcgtgaatgatgtacgtgccacataagtgagcttactgtgactgtacagtcattgtagatgaaggaaaagagaccctaaagagctatgccgatctacggttttggcccagcttatccaaagtaggatccatgctctcgaataggtggggcgaaagaggcgatcgacgcttacttccgcaacctcccttttatgtagtatgacgaatgacatactacggaaataaagatccaagacgttgattctgggatgatatctgacttcctcataccctggacttgcatgataaaagtgtgttttatttacatttaacatggtcgtacggttcatactcaaatattggacatctcgacaaccttcgtggtaatgcccggagtacagccgagacctgcatgatttcaatgtgcattctccgttatgcacaagatcgagtccgagtttggattgaatttggtcatctgcatcgggagatgatcggcgggcttgtacgccgtgcaacaaagtaagctcctctgggatatatggttttactcgagcttccagctggctgcagaaactatatttaatcagaaccaatatattttccgggggcatccttatattaaccattcggatttcccggttgccgagccgaaaatatatggcttcggtccttctatctgatttcttgcggcgtttttctttgattgctatttaaacctgctagaacgaattcagatgttatctataaacaactggtctaagagatgactcgataccgtgattaaaagcatgttactttcctactgacccgggatatggttcgctcaagcctcttacgggttcgagtcaggagctatctctcacatgtgatattggagattgactgcaaatagaggcatagatgaggtcagtggttacacaagcaattaacctatgcattatgcgtttcgatgcagtcgtctctttgttggatggatgcaataattgacacccaataatgggaatgtgattcgggagagaacggtgcactatcccaccggtgaatacttacgggattctcccaacatgtagatctatagttagatggactcatcttgagcattgaatccccgcactcccataccggccaaggggtaacacaaagcctatgatatcagtttaatatgagcattttgagacggcaatggcggttgggggtctagaattggaaaagaacggatatcgaaaaacagcaggatgttcgcccgatcaacgaccagcccgaaatgctccgttggagtaggaaaaagcatatgacgtcatggaagatgatacgcggtttgccttgtttgcaatatctatatgcacctctttcctgtttcggccgccgccgcttttatgagtagatatcagcactggctcaaactcctttttttcaaggttcctcttcattccagggacgggagttgggtagtcatggtatttttttcagttattgtgattatgatggttactgtggtcttgagaatggtaaaaagtaatctgcccattttgtataaacttgggggtaatggatggtatacaagtttccgcaagacaagaagtcaaataggcaaagaaactgcggacatgaggtaaagctataaaccaattcagcaaatgaataatagatatatgctggcgttcgccgtattgatcaacttgaacgtgcacaggatgacacaaatgtgcccacaacgagatcgctgtacggaacctatcgtcttcttggctcaccattttctgcatcagttcgccgccttcttcatgatggctcacatgattttcaaagggggaaacgaacatttcgtggatgtcactggcagtaaccaaaggctttttgatgacattgcccatactgccaagcgggagagaaaatgctgtattaggaatagtcgtagggctaggccaggtcttcttgatgataattcccctaattccaatggggaaagcaatagagctgtgaatcatctttgtggtgacccgagccttttgagtgttgcccacgatctcaagtgaggcagaagagcaagtgggaaatcggcttggtggtgatagctccttggatgatgttgactcgatcttgagcttggaaggtgttggcatctttcggttcgaattggataaagaactccagcgaccggggaaaacacgtaaccggggtcaatcgggcgtccaactagtgatggtatgttgggtagagggggatcgcatcggtgctgtgattataggggaaattgaaaatgcctgctgcttcccatacgtcaacctacaaaaacttattagcctaatttcatagattgaaggggaatcgcaccacctgggagccctctcgcgcaacggcctggcatatttggcgttgcaaagtattgcatgcccaacacttctccccagcaagccgcttgaactaggagcaggtaccgtattgccaaatcatactgtagtggagggaacccgttctcaacaacggtcaggtgatacaagtcttagattttaggtaccgctgttttgtagttaactagtagttaactagttagttatgtaacattcagaatagcactgataacctagaatctagttatacattcctctcatctcacgaattcgtatattacgttcgcccctttgaccattgcatgtgttgtttcaatccgcatacaccatatacattgcgagcaaaagcggcggaggtgagcactagaacggaaggggagtgctaagcattgccagatgtttgccgcgtttgcagcttgtaatgtacccggaaaaacttcggcccttcgcaaaacagctattcctccccatctgcgcttccccagcatatcgaccaaccatcgacaaaatgccacgaaagctaagggcggctgcccaggcggctgcacagtcgataagtgagttgatctgaatctcacgttggcccacacctgccacaaacatccgtcccttcgactatgctttgaatttcatcctctccttaagacgcgtttgcgactaaccacattcagaaaatgtaccttcaattccagatgggtccgatgaggagatggccgacgcgatttcctctcagccctcctcgcccgtagtcgaaccagaagactcccccgaagatcccgatgtcgaacccgaggctgaaccagaacctaaacgtgaaccagaacctgaacctgaagccgaaagcgcagaggttcaggcttccgaaactcctgccacacctaagcctgccacacccaagccagaggaagaactgagtgctgcgactcccgcagaagactcaattcttgccgacactgacaacacaccttcctacggacctggccgcccatcacttccgcctcgcggcaagcgtcgcattggtcgcccacccaagaaccctcggcctgaatgggatccggctaacggagatccaccattgcgagttactactccagtcaagagacgccgtggtcggcctgctgctagcgggggacgctgggcacgcaaccgcggcccctctcacctcacccaggtgcctgtcgacaaggaaggaaacatgatggacgtaatcaacgacgaagtatcgattccacctgacccaattggcgctactaaagtcgatgagaatggccacctacaaggcggacgcgagtatcgagttcgtacctttaagatccttggccgcggagaccgactctacatgttgtcgactgaaccggcccgctgcattggcttccgtgactcgtacttgttcttccagaagcacaaaatgctgtacaagattattattgatgatgacgccaaacgtgatttgattgaacgcgatctcatccctcactcttacaagggacgagccattggtgttgtcaccgcgcgctcagtgtttcgcgagttcggcgcaaaaattatcgttggtggtaagaagatcaccgacgactacgacgaagctgctgctcgcgagcgcggtgatgtggagggcgagttggtcgttccggaagaccggctgcccggacctggagaaacttacaacagaaatcagtacgttgcctggcacggcgcaagcagtgtttatcacacaaatgcgcccgcggtcccgcttgttggtggaaagccagttgataccaagaaacgccgtgtgccagtgactgatgataactggatgctcgagcatgcccgggctgcaaggtgagttgatgtttgataccgagccacacgttgggccgtggactaatacatagtatagtaactttaactccaagctcgccgaaatgcgccgtgccaatctgggtggtgtgtacgatgtgcacaccaatattatgcagcatccgaaaatcatgcagccaacccacgcccgctgggagcgcgtttccccggctccaacttctgtcccgaccgaattgacgacgaacatgaactcattgaacatctcaaacgaagcttcttcttccggccacgaaaagcagacgccccacgaaacccaggaatcgcgcgaggccaccacgggcgaaacttctaccgaaagccctgccactaccttttcccccgttcccacccatctccatgaccactacgtcatccaggatatcgtctacgaatccccgccatactcaaacatgggcatcccgggccctgatggtgatgtgcaagatattggccccaacggcctagtcagcgtcgccaaccccaagcatcccgaattcatgagtccagagatcctccagttgcttccgtcggagtgcaaggaagcgctcattgatgctgcaacacaggaggttgaatggaagaccaagtggaccaccgagaccatgaacggcgagcgtgctcagccaaccaagagctacgcctggtacccgtaaaccctgtgcttgatttttcttttttcttggggttcttgcgagtcggcgaaatttatgggttatcatgggctggatggatggttggacatggcaggcgaaagccgctggagttattttctttctttctgcttccgagtctgctttcgctttctcaagatatgcctaggatagatatttgaccatgatgtattgactggtttttattccttttcggtcttcgaatgcatgtcgggtctacatgactgaacttggcttcgaatgatagccttctagataataacgaaccacatttttttttctacgatgacatgatgctggcctgctagcctttctgggaccttcgtcataaatacgttctctctctggtagcccttcgtccgtatcttctgactgtatgtagtagtacatggactaatgatttacaactaaatttatgatgcatatccaaagctgagagtttaaaattaataacttagcttacaagaataaataaaacaaagaaaaccgaggtcatctaaaactccaattgaaaaaaaaagcaaaataaacatgaacccaagagatcgagggagtcggcttgagaaagggtgttgaggagtggaacagccagataaaaaaaaatgacagaagacaagacaagacagatcggcacagacctcggggatacctaggtagtgtcggatcatatgtaaggagggaatggtagagaaacaagagagatagaggtaataaagaagagttaccggtacgtcagcaccgggagccacaggtggaaaaaggctgatagaacggctgggtcatgcatgcgagagcaaaggaacaaggaagagcaaagacgaggctgcattggtcgcgtggtaggaagtaagggaccgtcacatggccatttccgcgcgcaactttgccagctcggcctcttcgtcttcttcctcttgtgccttggcggggtgcttgactatagacaagtcgtcagtgagcgagcgatacatgtgataccggtgtatatggttccgttccaacttacgatctgtattccccgcagctggtagccggtccagttgactgcccacaggtacggtcccggtgtgaagcattttcgcgtccatcgcttcctgctccagaccctccaactcggcatcgagctcttcctcgtccgcctgctcgccgatagagaaactggtaatgacgcttccgatctcggcgctgagggcatgctgctcttggaggccctccctgcgagttattagtaagatggtaatacaagaatcgcgacagggcgatatgatagataagggtaaaggtattcagtgagcccgccatcaacgtacatcgtagtgtcgacatcctcgagcttcattccaccatgaatctgcttcatagcggcacctgcctgcttcatagcagccaaggtctcgtggttgatattcgcggcttcgatggagtatatctgctgctcgagttgcatactctgagctgttgtctgctcgagagtcttctcgtggatctttttccgtcggagggcatttttagcggctattgaacacaaagtaaaaagagcaatagttagccaaaactgcaaccttcaaatagatgcctagcgacaatctgcaagatccgcagtcataccattcttatctgtgttgacgttcttccgcgctatagcctcctgttctgagatctggctctcgagatgcctctcacgtttctgcagcatatcgagctgcctgcgcaaatttagaatagcctccttgggcatatctttccgcttctgggcggcggccccgccaaaccaagaccacatggtgatgtcggtgactgtgtaactgggaaaccgaatggaaaaagtaagcaggatagaatccggtggtcaggtaatagctaggtaatatgtccaaggagaccagtggccgaaaatctggagtgagtggggagagaagagtagattggttgttttctttgctgcgagtcaggtggagcgataggctctaggcagagccagggagccgacagacgaagtaagaaaagggcgtaaaatgacctccgaatgagcagggaatctgaagcacacgactcgtcgagagcgcttccaaggataatctctggatgaatgcaaagtgtggaggggaaggagcccgactttcccctcgctgaggctagttatgacatacacggtaaggttagtcacgtgcgccaacaagaaccgctctatagcgcggaagaagaacgtcatgtttgtggccttttgatctgtctcttattcttttctttcaatattcacacttttataatgttgagcatcttcttcaactagcgcagagatgaatgggccgcgcccctcgactcgcgtgttcctctccgatctctcgtctctacaggcggactcgaaggtccgctttcttggctggtgcgtcaggcccagagcgaagaagaaattgtataaagttgaggctttccaatactaacgatgatctacgttcttgtgtacacatagtgtgttatattataacatcaaaactggccatttgatactggaacacaactatccacgcagcaagatagctccaagctctgtatctgtcgacatcaatcctctcctcgaggacctgaccgccgaggaattgggcgtagggacatggctgaatatcgtgggctatgtcagagagtcggagccgctgccgccaccatcttcattctcctcggacgcgaaccagccgagccagaggccttctacgtgcccccctcgtccggtgtatgtcgaggcaatcatggtatttccggccggagctattgccatcggggagtatgagcgaatcctttgcaattctcagcatgttgagcggatgatacagttcaacaactaagaaaacgaaaacatccgtagtggctgaaaagatgacatggaactaaagccaatcacgcattaatggagcgtctctgcattagatattttgctatgtaatcacttttcgagcacctcatatacaaggcgaggggtatcaagacgtaaatcaaaacaccaggccaaaaggcctcagaaggcaacctaaaccgcctcttccactttcttctcatctgaaagatgcacctgctgaagctgaacctgcctcctagcccgcttcccctccagcttcatcttctcctcctgcatgcgcagaataaggggactcttcatacgaatcttatgcccatacttatagaacacaaacggaatcggcacgatcacgacctccaacaaccccaacagagtgcccgcccaattcggccccagactggcgtacatagaagatccagcaagaggcagaacaccaccgaggatactccgaataaccgagttacccgctaaagcagaagcagcatacatgccgtaactgtgagtcaggtagttggacgaatagatgaaaacaccggtgtttccagcgccgaacggaatacccgcgagcaggggcacaatccagggtatggaggctggggagcaggtccatgcaaaccagagctcgccgactgggatcaacgctgcgcagatgcagacgaacgagaccattgcctcggggtgtaattttccggtctcggggtctttggcgtggctattgattagtcgccggattaagggttcgcaggcgattgtgaggacgacgccgatcccgatgcctaggaaggcgagcccagaaatgcccagttcccacccgcgaatgtctcggaagacgattgggtaggctacgaagcagaggtacaggatgccgtagatgattgcgatgtagatgttccagaagatgctgagcgtgttagaacatgcgatgtgggttgctgctgggtatgtaagtgtaagaaactcaccagattggttcggtgactgccattacaaatggccggctgaggttcagtttgaggatttcagcaaggctcgccttttggtcgtatcgactccaccagcgggaatcgccgctctccttgcgcattctggctgctttcttttggagaatggttggtgcatatgtttccttgaggatgatagcaaagaccaaagcaatagcggagagcatgagcgcgatccagcacatccagcgccagccaagatattcagtgacgaagcctccgataacaggaccaatgactacatcctgttagagatggactcgttatatcagaaaagagaataagggaagaacaaacctggtccgttgagtggcccaatactccaaacagagattgccagagcacggtgctcatcatccaccaaatcagccaccataccgggcgcggtagagatcatgacactgccgaagaaagcagcgatgaagcgaatgacgatcagtgccgtgacggacttggcgagtgcgcaggggatgatcaggactgtgaacacggcaagacaaattacacagacaggtttccgtccgtagacttcgctcaacggggccatgaacatggacccgatggcaagaccgaacagatagaaggtcaagccaagggtgacgataatcctggattggccgaattcctccgccattaatgtgatacctgatgtataagaagttgaatataacacgcttccgagtttgttagctaaggaatctcgcgcttccgaacttcaagatagaaacttacacgatgagagtattccatgatagaaacacgatgcccatggacttatacttgaagttccaattcttggggttctcagggtcatcattgccatcccagtcgacttcatagtcggggtcagcggtggcattggttgcgattgtcgttacacgctccgacagtgacatatgcgaggtccgcgaggcacgagctgtcaatgtctttcctagcgcatcgcgctcgatctgtgcgtctatcgtggaaattgactcgatagagtctgtgtcttgggacatcctctcagtgtgttcgggccatttatcttggccctccaaattgaagtcctttgttgccattccctggacgaagggctttcaaaccaatgaaacagtaccgggagcttgggtgtgtaccggagatcaaatggcaagttactccaatattaagggtcgcagttgatagaataggagaaataagagcaaagaatccctctattttcgatttcagccccgaaataaggttgtagaagtagagtgtgtcgctctctccttttttttatatagagatgtggtggaaaagctgcaaatcctgaaaccgaggttgctttatcaacagcaagcctccaaactgacacagattgtgacagaagatagccctggagaaattgaaggcatttatcatcaaaacacttggaaggtggggctgaaagtcattgataagcatattcaaagagaatttgctaggctcgtagggcgtacatggcttgcaggatttgcgatatgccgagaagatgatctatagcccagaaaaaaaaggggaggatacttacttttcctagtaccaaattgtatataactatagggtaacagagcatcagatttcccttatatccctataccccctatactactccgtgcctggactatgtcctacaagcccttggcatggatttccccatgggcaaagcgatttgccatggcgtgatatctccgcaaagacagaacttgtgtgttccgacccaatttgtctccacacggcctattaggctcgaaagagtgcaccatgtgggttctagcctgggctgtagcgtgccggtttgccgaatactgcctgtgagagctgtgcaatatatactgagggtgtatttctcatggcataataataataatcattccatgtatactacttcgaccttgaagtataaagtagatatcaattttggtccagatcaaagtgggctcgcgtggaaccgggaaaaagcgggttgtgaagagaatgaaacatgaatgaaacaagaatagaaacttctatttcgatcccaactggttatagtcacttttatgtatgtacctatacgtaccggatattccctggcgggtggggctttcctatttgagctgccgccgcttttatgagggtgctcaggctcaggctcactgagtagatgtcagaacgggctcagatcagtgatcatgctcagatcagtcacgtgcaggatgactgatgctcagtgagtgctcagtgagtgctcattggatgctctctgattactcagtgatgctcagtgtccaatcagtgagcaacactgatgcacatggggatttcctatttgagctgccgccgcttttgtgagggtgcttaggctcaggctcactgagtagatatcagcacgggctcagatcagtgatcatgctcagatcagtcacgtgcaggatgactgatgctcagtgagtgctcagtgagtgctcattggatgctctctgattactcagtgatgctcagtgtccaatcagtgagcaacactgatgcactcagcccacctcagaccttacccagaagggattagcccccacagggtcgtttatactgtgatagttagttcgttgaaagcattgttgctgccctcattttccggagcactacacctcatcaagaaaatacattatgacgaaggggcgcaggaaagagcggagaactccattcgtttcatgatgtcttccttctgtcttctaattcagagcggctcgagctcaaagtcccaaatataaaggcagaccgtgtgccagcattagcatgtaataaccaacacgccttctattcaagcgccttttacttggtacattaatctaatatcgcattattttactttgaatacatctcctacctccaggttgcaccgcacttgattatgggcagaaaagtcttttttgccaagcgcgatggaatcgctaaggagaggcgccgtctacagcgagaaaagaatggttatgctcctggggtccatagagaggaggactcaattcgagagaaagacaaaaggcttcccaagaccaacaaattacatcaagaaactatgaacctctggctcgagtgagttaagccgcatctgaagtggcaatccctttcctattatgaattctgctgatcttcctttagtttcactgcaaacccggagaatgggtttgaatccacctcagactatacccggaagggattagcccccacagggtcgtttatactgtgatagttagttcgttgatagcattgctactgccctcattttccgaagcactgcacctcatcaagaaaatacattatgacgaaggggcgcaggaaagagcggagaactccattcgtttcatgatgtcttccttctgtcttctaattcagagcggctcgagctcaaagtcccaaatataaaggcagaccgtgtgccagcattagcatgtaataaccaacacgccttctattcaagcgccttttacttggtacattaatctaatatcgcattattttactttgaatacatctcctacctccaggttgcaccgcacttgattatgggcagaaaagtcttttttgccaagcgcgatggaatcgctaaggagaggcgccgtctacagcgagaaaagaatggttatgctcctggggtccatagagaggaggactcaattcgagagaaagacaaaaggcttcccaagaccaacaaattacatcaagaaactatgaacctctggctcgagtgagttaagccgcatctgaggtggcaatccctttcctattataaattctgctgaccttcctttagtttcactgcaaacccggagaatgggtttgaatattaccaaacctcccttggttctccggctccaactcatgagatgatcaaggcgtacattcgctggtacgcaagttctactcaagggcgactgaacgatgatgggctacctacggtaagaaccgtgagtgcgcatgccgaacagttctttggtggatttgaacaattcacaaaaattaaaatcatcccagacgatcgaaaggaaataaaaatggttggtttattcgtaacttcctccctgagaccatcataaactaacatcgatgcagtggatcaaaaaaaccttgacggcagatggcgtcgttgtagatcaaaagaaagagaaacttaacttcacaaggcatgattttttgagagtagtctcgtctttgtggtagactgatcactaaacgttcattccgggactgcttaaagttgttatcttatttgctctccagctgtatctctttactggagtaagagtcggagctttcataccctctagtgaggacaaatatgaaagaggtctttgatacgaagtaaggcgtctttactccaccgatattatacaacattaatctctatcctagcatatcaagctggttctgtttcctttatccacagctcgttggacagtgggttggaaggtggatcagaaatggcttaaaaattgtcgatgtgaaaaatatacagtgtgagttagaaggacctagtgttatatttgtcaaacatacggggacttcattaactagtgcctctagattcggaattggtatctgggatagtaataggccgcaatttgcgttaggctaccttcttttctctcttgcattagcgtatagtgctatttatggggtggatactgtggatgatctagcgcagtttgatcttttaaatggcgagatttatttgagatggaaagaagagtacttggataaaccagttctcaggcatgccacggctgatgggcctcaggagacacctttgacgaaacaaaaattttgttcttgcctgcgttagatttttaatgcagtagggtactttggtgaattggtaactatctattgtatacgacgaggccttgggggaaaaattgaaagtaagcccctgaaaccacacaaaacaatcgatagacactcgagagagctcttcatactaagttctttacagagagaaatggctctgtacctgtcagtcaaattatggggcatcggggcccaggcacctttctggagcattattaagcctactgttcctctatagatatagtgggagccgctctagatgaggaagaccaatccgattatatcgagtacttttaaggttatgtttaatattacgaacgtggcttgctaggcgagttgccagtagagattaaaaggagtattttggaaaaaccagatatggtggaaatgagagcctagatcgaatcattcgcgtagaactacgacgaggattcccttaagaatatgaatttggaatacaggaaggcgctcgttcggcatcgcctgttcgaactcaagcaatatcaaaatcggtgggtacaggagaaaagagaccagaaaattatcaattgaggaaaagaagagccgacttatttgggaaatgacatttgcacacgtgctcaaatgttgattatgcccgaggttgcgcgaatcgcaacagccatgtcctgtaccaaagagctttcctttgacgaaaaacttcttcttatctaagatctacagacgcagtgtgcctgtgatttcgatgtggtatacctcctaaatcaaagtccggtttatgggctttgtcctgcaaaggggtgctatattagtattgtaaggtgagtgcctaggctgaataatgacatggccaatactaactccgctagtctgaggaagtgtgatagaagtgcctacatttacggatgtgttcggcgtgagaaagcttctgacctttaaatattagaatcagagatgcggttttgctatgaatgtatggaatggtttttgtcgagtcaatggcggaagcattgcgatgcctatctctagtcatggcaaatccagtactgcgaagtgattatctatcgccataccgtcattcgcctaggctattgccccttttgcttgtgggacccgaacctgaatctctccgcagaaacccgtttgcgatcctggctgcgaagtgacaacctgagggaacatattgaagggcagtatatggctgaaattcagcgttttaagaaaaagccgatatgcggatgctctcaaatctttaataatgagcgtgaccttcgaaatcacctacacgatgcgcataggctaaagaaaaccatatggcaagatctaaagctacccaacaaaaggaagcgcacttgtaaggtggaaccacaatactctttaatagaactaggagaggagcatcctaagaaaatcagatttcattattatatacctctgtgccatgagcgtgagcatgtgctaaaagaatcatttgtccccgtcctgtccttacttccgtctgtcgaagagaatctggaacaatactcggggccgagtatgtgtgataaatatagcacgaggagtagaagcgactcagtggaactatgcttcttagaggcaagtcccctacccagctcggggccaacaactccaggtcttgaggccattgatcctcgaggtcttgaacctcctgcattcaacagcgacaatgcacgccaatcttgtgacccagttgtcatccagccaaattcactcattttcctaccagaagtggatgaggccaccaaaaagtccgtcagtggcataaaacagccgcaacctcccgctctaagctttgccagtcagccttctgaatactgtgctgtcactgaagccaatgagaggaaagaactgcaatgtctcacctctttgtcgacctatgaccaagctgttactgcggaatttgagtgggagagtcatccacttatatagggaggaggcggcgagggaaacccgtctgttgatgatcaagcccctcccagtggccctcgcagaaccctcactagatccaaggcacaaactcagtcgccccagcatcattcagatagtttgaacagctgcaagccccggcagaggcttaatgcaaagaacaaacgaaagttgcgtgacctacagagacagaatctgaccctgagacagatcgggcctcatttcgcggatattgatatggcgttactgcgacaggcttggatggaattgaagccttctcagagatgcaccagatctcgggccaattgaaagggcaactgaatcatattttcaatcaatagtatttcacttgtgcttggttattatcagtctgtacaaaatttgctattcagccgcgtagtccaaccctcgccgacctaactagactccttgtcacaccatctgaaagttcctagctgtgcgagaataagggatcagttagaaataaatgactcaaattccggcaggatcgcgggctcgttctttaaagagtaaacgcgatgtacgttaaactcgaggggcaaacaccctacactttcagcgcacaagttcgaagcatgatgagcttcctttttaggtgggcccgcggatagccctttaaatgatagtcgagttcttatttctagtcgtatttgattgggcctatccggaaaataactgcagtgggcaacatgtaacagaccgtgaagactagcaatgcaagcaacttggtggctgttctggcgaaagcccaatacagccagcttgttacatggaaacagacagttacattacagttacataatctgcaccgccacagacgaacaagaaaacttagtaagtaattattgagtgtaatgtaacgtaccatgtatgttttaccttgtattatattacagctgctaagtattcaatttctagttatagttggcctgtggacaaaattgatataaaaaagcgtgggaccgatctacgagttcaacatgattacgtagaaacttgctcgtcccaggtgagtaacatgcgctcctaagaacctattggcatccagaaactctctgagtactcctagagaccagcttcctgccccaggagcgccgcatcgttcccaggaaccaccgagtctcccgggagcctgatacaagctcctagggcccaattctaagttcccgggagctcaggggctcctgggactacccgtgccgttcctgggagcattcattcggttcctaggagcttgtatcaggctcccaggagactcggtggttcctgggagggacaatgtcgtctgggaatgactagcgacaaataaagagcagaaaacagacttattgaactctaagccattttcttgtcatgacgttggaacctacaacacagagctaatctagcaagcaccgtagctggcaatccgggcatagggtcagttgaagtcccctttgttcttgcacgaattctagggatacagggtcaagggatttattggtggacaatcacaagctttctatcgtcgcacactgaaattgcaacattgtgttgatacaaaactctgaaacgactttgatttaggtaatagatcgcctccatctgtttacagtctgtttcttgcgggctcaggcaaagtaatgcactgcctgcctttcacataatcccgtttcagaacggtcgccgcaacaaaatgatccttcgcatgccctaatccacaggattgggcattctagccccaatggatgtagtaccttgttcacctggccatcaattatggcgtcattgatattctccggaaacctcttctttcttcctgttcagagcctcgctggtgaggacctcgaaagctggtaaacccgaatacctagagtgcgaatggtgaccgggcaaagtttgtgacttcaacagtaaatctttaactgttccttccttctggttgtttggggtggtgctgtctctcttttgccagttggtactcgagttccctattcttgagctctaggttgcaagctttttgttgagctatcttgatatattcaataaaacactggttctgcttctccaagccggctttgtccactgcgtgggcccgtaacatgttgtcacagttttgtagcataacggttgcctcgtagtatttttgttgcatttttgacatttcagaatatatactcgtaatgattccctcgagcctttgatttggatgttgcatgcctgagacaagttaattcggaactttcatggtacttcaatcccagactgaccttgataaacgattggtaagggggatgggctcgggcggtccgacgccacacgtcttctatgtggaggcatttttgatcggttttggcttttcggacgatttaccacttcttgtaggagaaataagataattgtcagatacagtttttcaaaggccaatggcctctatttaaaatatttttagagggcttatgcattgctgacgttcccgcggtgtaaacgtcggcctcatcggtataagatcgtctactttggatgtcaagccacaagcttctgggatcgtattgcttgctcttgggctgtgagggtctcacgtatacgtgaatgaggacagcgtcttccggatgaataatcaatatcaaggaaatctatagtcgactctagattaaagacgtagcgcgaggaagcttccgcgtggaggggactccatatgcaccatgtgggtccagcagatcatatctcaatttagcttgtatgttatatgtataaccctggaaatacgatgcataactcccaggaataggtgcgtgcttcctgggaacactataacatatcccgggatccttggggctcctaggaaccagccgcagaatcccaggagtaagtatcacgatcctagaagccggtgactcgacatccacttttaaatatatccgtatccatgatatgccctccaaaaatatttaaatagaagtcactgcctcaaagaaatgcgtcttcaaagctcctcagccaactactgggggtgacagacttctctctgaattattactcttagccatccttttattaccatctgtataggtagtcgttacctatacgttcacaaaatctgccaagatgccgcttttgggacttccactagaattacttttgtggattggcacgtccatcgacaagaaggaccttcgaagtctgcgtctcacatctcgagaatccaacgttgtcttcacaaaaagcctctttgattgcatagacttccaagacaccccgccaattcattgggcaatcgagcatagaaacttaggcatcatccagcactctctgggttgggaaaaggcagatatcaaccaaccgttttctggccttacaccgctcatgttggctacaaaattgcggtacgcagacgctgttaatttgctcttaagccatcattcggtgaaagtcatacagcgtaatactttgggagaaagtgccttctcgatcgctgttctgcatggaagcgtgaaaattgtcgaacgactcctcaatgtgcagaacattgatctcaataaccaatccctggacggaaatgcgcccatttcaattgcgctgacctgtcaccaaacctacatcttccaacttctcttgtctgatgagcggacaaatgtcaacatctgcgaccatcatggccaaacaccactgcacctagcgacagaaattggcgattatggagcaatccaaatgcttgtacgaaatccgcgagttgatgtcaactgtttcaaccaccgacaggaaactccgttgcttctggctgtcaaaggacacggtcgttttctccccatcaacaaaagactactcatcgttgaagccttgcttttaagttcatgcatcaaccttaattatcaagatgagaatggacgtaccgcaatctggtatgcagtgaacaattccgacataaaactggctgagctcctcttgcagcaaacaaatctggacctcaattgcaccgacaagctgggtcagacacctttggcaaaggctgctgcaaatggctccttagacttgatcaaagtcctcttccgtcagccggggcttcataaaagccctcaatctgccgatgcatttccgccgctctggtcagcatgtcgcgcaggacaattttcaatggtggaatttcttttacaaagttcagccgacattaaccaaaaaagtccatcggggacgtcgccacttcaggtcgcaataatcatggagcacgtcgacattgtccatctccttctcagctacggagaatctttgttgatcaatgaccaaggccctagctcctttactgcgctcatgtttgcgtcagctcacggtaggtttgaaattgccgaaatattattggagcatcccaacataaatgtaaatgcggtggacgaccaggggagaacatctttctggtggggtgcggctggtgggcatttagtggttgtgcatttgttggccaatcagcgtggtgtgaaaaagcgactgaaagattcaaatggccagacggcgtatgccatcgccaaggaacgcaagcatgggcatgtcaaggtttatttgcgaggcttctagggttcagctagtttatagaaagagatttcaattgatgtgttcacggcgatcgggttctctgagtgcaatacggtattgtaacagcagtcttttcaccgcggcctgttgtctactgctcatcttctctagtgatcgataccaaggacagatctgacgagcccatctctagtctagagattagcagtgcgacgggcttgtgctaatgctaactaaactggaaggaaggactgatctccatctgacgacatataatattagctagcttacgttgacaggaagtacacaatcaagtgattgaattaatcagacgcacagggttagcgggatacgacggtccgccacctgcttctgcgtcgaggatacgatcgttctctcggcgccatcgaatgtaaaatcatctctacaaccaagcaatacccatatctaaaatttgccaatggacaatgagatctaaacaccatcgaccgatggatgaacggccttgatcgaagccatgagtcagtcaacaacttaactcggttctcattcggggatgcagaagatgttattgtaagctgtcttcttgaagttcattggaaaaaggttaccgaagacttctgttgcaagaacgctctgcctgtatttgatggcctttcgctcacctgcacgtggccaagaatggcgaaattccgcacgaccagagcttcctctttggacgaccagttttgaccacactcattcccagattcctaaagcacaaccgccgcagactcttccccactccgatagcacaaccttaaagtacacgagtcttgattccggttcagcttatgaaccgccatcatctccaccggattctccaaaggcagtggctcaccgagtgcctacaagatctcagaccagctgtgcaccctcggctgtacagcgtcgctcgcagtcgccagactcatcaggctccaattcgaaccaagcaattggccacaaacgggcttcaaccaagttacatcctccccatcttcccaacgagcaggtcatcaacgggacgcgggaaataatcaaggcaaccaggcccggtatcacgatgcgcaattttgcacccaacgatgtttactcggattgcagtctggcagtgtgttagatgactgctgtccaaatgtgatgctccatcatcgaagcaaagacaatccccagcatccgattacctaaaaagatttggtccgtttacttaatgcgcaactggacgaaaacattgaccgatgcacacatcttggcggttgtggggcatactccgtttgaacttgcttgtgttgaatatggctacactgttattggaaaaggaaccacatcggggctgtggaaagaagtctcccgcgaggcgcaggtataccaaattctgcggaaggcccagtctgcaaatatagataaaagccgcaacaaacctgtacacacacacacacacacaattcattaacgcccggcggctgagccgaaagggcaactatcactaatctaccagtacatgcatatttgaacatttgccgtgtctccttggagcccatgcggtatttcctgccgtctttgacattacagtttccaatctcataactggtccctgtgggttagtattgattagtagactggcttgaaggcgcttcttcaagtgttcaacatcctatcctcggcagttgaagcgcgtccaccgttctcacaaggtgttggggttagtaggggtaaagtattctatctgcgttcgtcggcataattaggtggccccgagtcggcccgtagcgatggcaaaccgtattgaggctcgcactgcttccaaattcggcgtccacttttgaccatcggagggcgacttcccacccaagaagaaggacatgttacttcggcgagtgtgggtacattgcagcatttctgtccggtgcgcggtccacttccgacatcgaaagagaaagtggtccacggtctctcttgcttgtccacatgcacattgatctgtctcggcagcattgattcgaaagagatatccattgagtcttgccatgccagtccggagctgggccaacacgctcgcttctttccacgataatcggtcatacagctgtcgcgtgtgtttccctggaagtgcggtatccactcggctggaatgtcttcctatgtcctcaggtagcttcctgctggggattgcttgggcacgcgcaatcttcagagtcgtcgatttcattttggggacctgtacttgcgagatagcattttcttgcgtcgcggctctcgcgtgctctttcgccatccctagtagtttgttgtcttcgctagtggggacccaccggacgctgatctgatttccatgcctctgcaatctgctcatcagcttgtagctttggcagacgaattcctgacccgactgttgtcgcgggttcttcaacgtaagagccgccgctttgttgctcgtgatcagtgtgatcctaaagtctttcaaccccacgagtgtcttcagtgtatgcgccactgccgccagctccgcggaaaatggattttgctctgttctcgcgctcaacgtgacggacaaggtcttcagtctcactttgcgatagcgtggtgcagatataatattgcattggtatactaagatctagtctgttctttaagccaatacaacggagagatgggcaaattcccccccatgctttcccagctccttatccagctcactagtactctcattcctagatgtccgcagatcctcttgccttcaagatcttagcctttggggttccagcagagccaaaaaccttcccccacactcatatacccgtttgctccttaagcccaccctccaggccaagttgcagctctgctaagtccccttagggtcacggcataacaaccttcctgcttcttgtgaaccgacatgcgcatccgtcctctcgggctatactgacagtgttgtaaggatctctagtcggcagccgatggcgacgcgccaaccttcttcctagccatcgttgccatagtatacctcagtccacaagttggcgtgatttcttgcttcctgatacctagtatcctctcgttctctaggccgaccatgtcttgcagatggtccctttatacacccaagcctgcagcgtataatctttccatccactaaccagagtatcctccgattcgaggtaagggagccagcagccgatggcgatacaccttagccctaatcccacaaatccaattctaccccacaggtgtcctgctcgacttcgatccgcgcctctgagaggctctgtgaactccccttggggtgacggcatgagaggctgtaaccgttatcgtcggatggtttttaaatcgttcctatgtgccaaaggggcctcgaggtcgctagaattgcggtggaggcaggccgcaacatcgcggactcgtttcctctggtcgtcattgcgtctctcattggctctggagtaacagagactccaggttcgtagcccacgcctcgtacaggctgagaaatccgatttcgtgggcccaaacctgtacacttccccactcacgtccttatttattctaaaccgactgttcttaaccgactgtgcttgaccgtttgtgcttgaccgtttgtgcttgaccgtttgtgcttgaccgtttgttcttgattgtttgttctttatttttattcaccaacaattgctggctgtttaacaactatctgccgtcaaccgttcaatttttaggtttagttataaaggtgttatttgagaacatctatgtcagaaaatttgcttgaccgcaacctggccgagtcagtggtaaccgcagccccacaaagcaattcgcgataataaagttcgtgttaagcagctgtagcagtgcaacaaacaaacaaacaaacaattcattaacgcccggcggctgaaccgaaagggcaactatcgctgatctactgtacatgtccatctgtacatgctgtgtctcctgaaagcccatacacaaaaccttatcacatatgacattttcaaaaagccgtgtcgcagcgagtttctcgtgagttagtaagtgggtgagtagactggcttgaaggcgcttcttcaagtgttcaacatcctatcttcggcagttgaagcgcgtctaccgtgtgtggcacgaggtggtgggtgagcagggtcggaagaaggggtgggggttatgttcgtcgatatgttcaggtggcctcgaggcggcccgttgcaatggcgaaacgtatggaggcccgtactgcctctaggtttggtgtccagttctgatcgtcagaaggctgttttccccccaaggcgagggatatgtttcctcggtgagcctgggtgcattgtaacagttccgtccggtgtgcagtccacttccgacaacggaagaggaagtgctccacggtctctcttgcttgtccgcaatcgcattgatccgtctctgctacattgatttgattgaggtatccattaagtctagccatgccggtccggagttgggccagtacggtcgcttctttccacgtcaggcgatcatacaacagccgggtgtgtttgcctggcagtgcggcatctactcgtttcgcgtgtcttcctatgttctctggtagctcactgtaggggactgcttgggaccgtgcgatattcaatgtggtcgacttcatccgcgggacgtgttcctgtgggagagcgtcttcttgtgttgcagttctggcttgttctttagccagacttgacagcttgttgtcttcgctggtgcggatccagtggattttgattcggtttccattcctccgcaaccttctaatcaacttgtagatctgacaaactagctcctggccagactgtcgtcgggggtttcttagcgtgagtaccgccgccttgttgcttgtgagcaacgtaattttgtagtctttgattcccactaccatcttcaatgcatgtgccatcgctgctagctccgcagagaacggattttgctctgctcttacacccaatgtgacggagagggtcttcagtttcagttttcgataccgaggtggttgtttctcgatcgccacaccgaatccgaccagctcgttccgagccgagctgctgaccgcgatctgcatatacaggcctgctctggtctggatttcctgtggttggtccatatcaggttgtatgcgttcttcccacggagctaacatagatggattaattgtttccagtgtttccatgtcgatatgcttcagcgcatcggctacccggtacaacggcgagcgatggtatcttctgaacttcctgatccggtctgtacccctgcggagggggttggtttcaggcagggtatgcatgtccgtccacatcttcacggcccgtctccagaatcgttgtcgtgtggtggtacttcccgaaactggtgtcaccacctgcactcttcgtttgattccccaaccctaatgccaagatcctctataccgtattgggaatagacccgaagtatcgatattcctgttagattacctatacgaccctttacgccaagtgatacatactaagctcccaggaactgttagatccccaaattacatgcatttttataacccagcgtgcccggatctccatcaagataactttatctcctaattgagcagagggtatatgtatgccctcgggaggtctcgaggtctggccagatatccaactaaccaggcaagcgtctctttagtttggcttgtttgtaagaagttgctgctcaaataaataatagactaatacgccattgatttttatcattgaaaccgaatataaaatactgccaagaccggggatcatgaactttaataggtatagcgtgttttgaaagtggtgaaattgatttcaatccatcctgtatcaatttcgaatttcactgcacttgttagtgaaacaaacctccccgcttcccctgactgttccttccgatctctgagaacgtgagtgtagaggctataagagtctgccggccggcccctcaaaagtttaatctgagcaaccacgacccctgaattatgactgccacttcaccccttaaccccgcgaccacggcccagtgcctcttcatcaagagtgacgatatgaaaaaagcatttattcatctacccgaggagttactcttcctgattgcaagttttctagagaaagaaaaggacatcagctcgttatctcgaacttgccgaaaatgctatcttcccctcaactccttcctctatcaccacaattcgttgctaggaagttccgctttgctatgggcggcccagcgggggatggaagtaacagctcgtttctgtattcaaaatggagcccatgttgaggttactgatatccacgatcacgacagaacaccactattctgggccgcgtgcaagggctacgaggctgtggtgaaactcctacttgagaccgggcgggtcaatgctgattcaaaggactcccacagcgagacacctctgctcgcagccgctcagaacggccacgaagcggtggtgaagctcttacttgatactgggagcgttgatgttaattcaaaatgcgcctacgagacaccgctgttccgggccgcgtatcatggccacgaggcggtggtgaaactcttacttaaaactggacacgttgatttgcagccaaaggacgacccctttggttggacaccgctgtatgtcgctgcatggcatggctacgaagcggtggtgaagcttttacttgcgaccgagggtgttgacgcagattcaaaggactccaacggctggacaccgttgttgcgggctgcgcaggcgggccacgaggcggtggtggaatgtttacttgagactgaacaagttgttgtgcagccagaggaaggccccggcgattggacaccgctgtccgtcgccacgcagaatggccatgaagcggtggtggagcttttacggtggagcgagtggcgaagcttttggaatcgagcaggtcgataaatcaggaattcgtaaacaatataaacgggcttgaaactcgcattcccataaagattcatgctttaaaggggctagcttggcgccatcttggcgtgatcactggtgattgaatgtgaaaaccaacctctaccaaggaacgaaggcttccgaagtggtgccaattaggtcgacttacagattaatacagcggctaaatatccagattactctatgtaagaaacaatacacggcccactaacaaggatactccggaataactcccaatatagactagtctgtcttggcagttagggtttgagaaacaatcgaagagtgcaagtggtgacaccagtttcgggaagtactgtatcgcagcggtaccctatacactgtaccctatacagtttcgagaagtactgtattccaaggacatactcgagagatagagagaccggaccatggggatgaccacgagaagccagccatctcccacccccgaagccgcaaaccccacaatctcacccgaataccccaacgttgaggacttttctctcgccgaggatgattctcatgatgaggacgattctcacgtcgaggatgattctcacgatgaggattactttctcgtctcaatcacctacgactactccaccatcacagcccgagctcgttcgttccaaggaatagtgcttgctagggccactccgctccaactggcccagaatggcttctattaccgaccttcaggagtcagcaatgtggcatgttgttttgcctgccaatcgaccaagcatttatccaccttccaatgcaccccgttcgaggaagtgcaacaactacacgaggaagactgcatatggcagataatctcgtgcgatttgaaacaccacctcggaactcccaacaaacccccctcctcaaccaccgcattccnnnnnnnnnnnnnnnnnnnnnnnnnnnnnnnnnnnnnnnnnnnnnnnnnnnnnnnnnnnnnnnnnnnnnnnnnnnnnnnnnnnnnnnnnnnnnnnnnnnnnnnnnnnnnnnnnnnnnnnnnnnnnnnnnnnnnnnnnnnnnnnnnnnnnnnnnnnnnnnnnnnnnnnnnnnnnnnnnnnnnnnnnnnnnnnnnnnnnnnnnnnnnnnnnnnnnnnnnnnnnnnnnnnnnnnnnnnnnnnnnnnnnnnnnnnnnnnnnnnnnnnnnnnnnnnnnnnnnnnnnnnnnnnnnnnnnnnnnnnnnnnnnnnnnnnnnnnnnnnnnnnnnnnnnnnnnnnnnnnnnnnnnnnnnnnnnnnnnnnnnnnnnnnnnnnnnnnnnnnnnnnnnnnnnnnnnnnnnnnnnnnnnnnnnnnnnnnnnnnnnnnnnnnnnnnnnnnnnnnnnnnnnnnnnnnnnnnnnnnnnnnnnnnnnnnnnnnnnnnnnnnnnnnnnnnnnnnnnnnnnnnnnnnnnnnnnnnnnnnnnnnnnnnnnnnnnnnnnnnnnnnnnnnnnnnnnnnnnnnnnnnnnnnnnnnnnnnnnnnnnnnnnnnnnnnnnnnnnnnnnnnnnnnnnnnnnnnnnnnnnnnnnnnnnnnnnnnnnnnnnnnnnnnnnnnnnnnnnnnnnnnnnnnnnnnnnnnnnnnnnnnnnnnnnnnnnnnnnnnnnnnnnnnnnnnnnnnnnnnnnnnnnnnnnnnnnnnnnnnnnnnnnnnnnnnnnnnnnnnnnnnnnnnnnnnnnnnnnnnnnnnnnnnnnnnnnnnnnnnnnnnnnnnnnnnnnnnnnnnnnnnnnnnnnnnnnnnnnnnnnnnnnnnnnnnnnnnnnnnnnnnnnnnnnnnnnnnnnnnnnnnnnnnnnnnnnnnnnnnnnnnnnnnnnnnnnnnnnnnnnnnnnnnnnnnnnnnnnnnnnnnnnnnnnnnnnnnnnnnnnnnnnnnnnnnnnnnnnnnnnnnnnnnnnnnnnnnnnnnnnnnnnnnnnnnnnnnnnnnnnnnnnnnnnnnnnnnnnnnnnnnnnnnnnnnnnnnnnnnnnnnnnnnnnnnnnnnnnnnnnnnnnnnnnnnnnnnnnnnnnnnnnnnnnnnnnnnnnnnnnnnnnnnnnnnnnnnnnnnnnnnnnnnnnnnnnnnnnnnnnnnnnnnnnnnnnnnnnnnnnnnnnnnnnnnnnnnnnnnnnnnnnnnnnnnnnnnnnnnnnnnnnnnnnnnnnnnnnnnnnnnnnnnnnnnnnnnnnnnnnnnnnnnnnnnnnnnnnnnnnnnnnnnnnnnnnnnnnnnnnnnnnnnnnnnnnnnnnnnnnnnnnnnnnnnnnnnnnnnnnnnnnnnnnnnnnnnnnnnnnnnnnnnnnnnnnnnnnnnnnnnnnnnnnnnnnnnnnnnnnnnnnnnnnnnnnnnnnnnnnnnnnnnnnnnnnnnnnnnnnnnnnnnnnnnnnnnnnnnnnnnnnnnnnnnnnnnnnnnnnnnnnnnnnnnnnnnnnnnnnnnnnnnnnnnnnnnnnnnnnnnnnnnnnnnnnnnnnnnnnnnnnnnnnnnnnnnnnnnnnnnnnnnnnnnnnnnnnnnnnnnnnnnnnnnnnnnnnnnnnnnnnnnnnnnnnnnnnnnnnnnnnnnnnnnnnnnnnnnnnnnnnnnnnnnnnnnnnnnnnnnnnnnnnnnnnnnnnnnnnnnnnnnnnnnnnnnnnnnnnnnnnnnnnnnnnnnnnnnnnnnnnnnnnnnnnnnnnnnnnnnnnnnnnnnnnnnnnnnnnnnnnnnnnnnnnnnnnnnnnnnnnnnnnnnnnnnnnnnnnnnnnnnnnnnnnnnnnnnnnnnnnnnnnnnnnnnnnnnnnnnnnnnnnnnnnnnnnnnnnnnnnnnnnnnnnnnnnnnnnnnnnnnnnnnnnnnnnnnnnnnnnnnnnnnnnnnnnnnnnnnnnnnnnnnnnnnnnnnnnnnnnnnnnnnnnnnnnnnnnnnnnnnnnnnnnnnnnnnnnnnnnnnnnnnnnnnnnnnnnnnnnnnnnnnnnnnnnnnnnnnnnnnnnnnnnnnnnnnnnnnnnnnnnnnnnnnnnnnnnnnnnnnnnnnnnnnnnnnnnnnnnnnnnnnnnnnnnnnnnnnnnnnnnnnnnnnnnnnnnnnnnnnnnnnnnnnnnnnnnnnnnnnnnnnnnnnnnnnnnnnnnnnnnnnnnnnnnnnnnnnnnnnnnnnnnnnnnnnnnnnnnnnnnnnnnnnnnnnnnnnnnnnnnnnnnnnnnnnnnnnnnnnnnnnnnnnnnnnnnnnnnnnnnnnnnnnnnnnnnnnnnnnnnnnnnnnnnnnnnnnnnnnnnnnnnnnnnnnnnnnnnnnnnnnnnnnnnnnnnnnnnnnnnnnnnnnnnnnnnnnnnnnnnnnnnnnnnnnnnnnnnnnnnnnnnnnnnnnnnnnnnnnnnnnnnnnnnnnntggtggtgaaactcttacttaaaactggacacgttgatttgcagccaaaggacgacccctttggttggacaccgctgtatgtcgctgcatggcatggctacgaagcggtggtgaagcttttacttgcgaccgagggtgttgacgcagattcaaaggactccaacggctggacaccgttgttgcgggctgcgcaggcgggccacgaggcggtggtggaatgtttacttgagactgaacaagttgttgtgcagccagaggaaggccccggcgattggacaccgctgtccgtcgccacgcagaatggccatgaagcggtggtggagcttttacggtggagcgagtggcgaagcttttggaatcgagcaggtcgataaatcaggaattcgtaaacaatataaacgggcttgaaactcgcattcccataaagattcatgctttaaaggggctagcttggcgccatcttggcgtgatcactggtgattgaatgtgaaaaccaacctctaccaaggaacgaaggcttccgaagtggtgccaattaggtcgacttacagattaatacagcggctaaatatccagattactctatgtaagaaacaatacacggcccactaacaaggatactccggaataactcccaatatagactagtctgtcttggcagttagggtttgagaaacaatcgaagagtgcaagtggtgacaccagtttcgggaagtactgtatcgcagcggtaccctatacactgtaccctatacagtttcgagaagtactgtattccaaggacatactcgagagatagagagaccggaccatggggatgaccacgagaagccagccatctcccacccccgaagccgcaaaccccacaatctcacccgaataccccaacgttgaggacttttctctcgccgaggatgattctcatgatgaggacgattctcacgtcgaggatgattctcacgatgaggattactttctcgtctcaatcacctacgactactccaccatcacagcccgagctcgttcgttccaaggaatagtgcttgctggggccactccgctccaactggcccagaatggcttctattaccgaccttcaggagtcagcaatgtggcatgctgttttgcctgccaatcgaccaagcacttatccaccctccaatgcaccccgttcgaggaagtgcaacagctacacgaggaagactgcatatggcagataatctcgtgcgatttgaaacaccacctcggaacccccaacaaaccgccctcctcaaccaccgcattcccctcccctaaaccgtcaactcctaccgccgattccagtacacaaactacagacgactccagtataaagtctcaaactcaatccacgccgatcacatttacttcagcgaaggaacggttgaacactaacctggactgccgttccaatccgctacccaccataattgacccagagcctcaacaacctccaacagcccactctccccagcttcatcaaacgataccgtccatcacttcctcgccccaaaaccaacaaacaacgtatgcttccgtcctccagcgacctgtcacatccataccgcgaccgactcctccagtgcaagaaccttttcttcccgccaaccccacactcacaattgaagatcttcatctccgttttcacaataaaccgtcaccgttccaggtcgagaataagacaagccaacgctcaaccaaacgaactcggaacaaaaccgtatctgtcacacaatcactgtccagattcttagcctctgctttgcccgcattctcgcggttcttaacagagatgcagccaaaatcggacgcttgctgtccgtctcattcgtatatttctcacagccgcgccatgagagcagcctaataccgcaaacggcagcaaggccacgacaggccttaccaggtgaggctcaaagttcaccgttcaggcagtttggatcaatcccagggatcaaccaagatgtatttagaaagttgctgtagcctgtatatcgttcgcgagaggtcagggtaaatgaattctactactgtatcgcagcgagtttctcgtgggttagtacgtgggttagtaggctggcttgaaggtgcttctccaagtgttcaacatcctatcttcggcagttgaagcgcgtctaccatgtgtagcacgaggtggtgggtaagtagggtcggaagaaggggtaggggttatgttggtcgatatgttcaagtggcctcgagtcggcccgtcgcaatggcgaaacgtatggaggcctgtactgcctctaggtttagcgtccgcttctgatcatcagaaggctgttttccgcccaggaagaaagatatgtttcctcggtgagtctgcgtgcattgtaacatttccgtccggtacgtcatccacttccgacatcggaaaaggaagtgnnnnnnnnnnnnnnnnnnnnnnnnnnnnnnnnnnnnnnnnnnnnnnnnnnnnnnnnnnnnnnnnnnnnnnnnnnnnnnnnnnnnnnnnnnnnnnnnnnnnnnnnnnnnnnnnnnnnnnnnnnnnnnnnnnnnnnnnnnnnnnnnnnnnnnnnnnnnnnnnnnnnnnnnnnnnnnnnnnnnnnnnnnnnnnnnnnnnnnnnnnnnnnnnnnnnnnnnnnnnnnnnnnnnnnnnnnnnnnnnnnnnnnnnnnnnnnnnnnnnnnnnnnnnnnnnnnnnnnnnnnnnnnnnnnnnnnnnnnnnnnnnnnnnnnnnnnnnnnnnnnnnnnnnnnnnnnnnnnnnnnnnnnnnnnnnnnnnnnnnnnnnnnnnnnnnnnnnnnnnnnnnnnnnnnnnnnnnnnnnnnnnnnnnnnnnnnnnnnnnnnnnnnnnnnnnnnnnnnnnnnnnnnnnnnnnnnnnnnnnnnnnnnnnnnnnnnnnnnnnnnnnnnnnnnnnnnnnnnnnnnnnnnnnnnnnnnnnnnnnnnnnnnnnnnnnnnnnnnnnnnnnnnnnnnnnnnnnnnnnnnnnnnnnnnnnnnnnnnnnnnnnnnnnnnnnnnnnnnnnnnnnnnnnnnnnnnnnnnnnnnnnnnnnnnnnnnnnnnnnnnnnnnnnnnnnnnnnnnnnnnnnnnnnnnnnnnnnnnnnnnnnnnnnnnnnnnnnnnnnnnnnnnnnnnnnnnnnnnnnnnnnnnnnnnnnnnnnnnnnnnnnnnnnnnnnnnnnnnnnnnnnnnnnnnnnnnnnnnnnnnnnnnnnnnnnnnnnnnnnnnnnnnnnnnnnnnnnnnnnnnnnnnnnnnnnnnnnnnnnnnnnnnnnnnnnnnnnnnnnnnnnnnnnnnnnnnnnnnnnnnnnnnnnnnnnnnnnnnnnnnnnnnnnnnnnnnnnnnnnnnnnnnnnnnnnnnnnnnnnnnnnnnnnnnnnnnnnnnnnnnnnnnnnnnnnnnnnnnnnnnnnnnnnnnnnnnnnnnnnnnnnnnnnnnnnnnnnnnnnnnnnnnnnnnnnnnnnnnnnnnnnnnnnnnnnnnnnnnnnnnnnnnnnnnnnnnnnnnnnnnnnnnnnnnnnnnnnnnnnnnnnnnnnnnnnnnnnnnnnnnnnnnnnnnnnnnnnnnnnnnnnnnnnnnnnnnnnnnnnnnnnnnnnnnnnnnnnnnnnnnnnnnnnnnnnnnnnnnnnnnnnnnnnnnnnnnnnnnnnnnnnnnnnnnnnnnnnnnnnnnnnnnnnnnnnnnnnnnnnnnnnnnnnnnnnnnnnnnnnnnnnnnnnnnnnnnnnnnnnnnnnnnnnnnnnnnnnnnnnnnnnnnnnnnnnnnnnnnnnnnnnnnnnnnnnnnnnnnnnnnnnnnnnnnnnnnnnnnnnnnnnnnnnnnnnnnnnnnnnnnnnnnnnnnnnnnnnnnnnnnnnnnnnnnnnnnnnnnnnnnnnnnnnnnnnnnnnnnnnnnnnnnnnnnnnnnnnnnnnnnnnnnnnnnnnnnnnnnnnnnnnnnnnnnnnnnnnnnnnnnnnnnnnnnnnnnnnnnnnnnnnnnnnnnnnnnnnnnnnnnnnnnnnnnnnnnnnnnnnnnnnnnnnnnnnnnnnnnnnnnnnnnnnnnnnnnnnnnnnnnnnnnnnnnnnnnnnnnnnnnnnnnnnnnnnnnnnnnnnnnnnnnnnnnnnnnnnnnnnnnnnnnnnnnnnnnnnnnnnnnnnnnnnnnnnnnnnnnnnnnnnnnnnnnnnnnnnnnnnnnnnnnnnnnnnnnnnnnnnnnnnnnnnnnnnnnnnnnnnnnnnnnnnnnnnnnnnnnnnnnnnnnnnnnnnnnnnnnnnnnnnnnnnnnnnnnnnnnnnnnnnnnnnnnnnnnnnnnnnnnnnnnnnnnnnnnnnnnnnnnnnnnnnnnnnnnnnnnnnnnnnnnnnnnnnnnnnnnnnnnnnnnnnnnnnnnnnnnnnnnnnnnnnnnnnnnnnnnnnnnnnnnnnnnnnnnnnnnnnnnnnnnnnnnnnnnnnnnnnnnnnnnnnnnnnnnnnnnnnnnnnnnnnnnnnnnnnnnnnnnnnnnnnnnnnnnnnnnnnnnnnnnnnnnnnnnnnnnnnnnnnnnnnnnnnnnnnnnnnnnnnnnnnnnnnnnnnnnnnnnnnnnnnnnnnnnnnnnnnnnnnnnnnnnnnnnnnnnnnnnnnnnnnnnnnnnnnnnnnnnnnnnnnnnnnnnnnnnnnnnnnnnnnnnnnnnnnnnnnnnnnnnnnnnnnnnnnnnnnnnnnnnnnnnnnnnnnnnnnnnnnnnnnnnnnnnnnnnnnnnnnnnnnnnnnnnnnnnnnnnnnnnnnnnnnnnnnnnnnnnnnnnnnnnnnnnnnnnnnnnnnnnnnnnnnnnnnnnnnnnnnnnnnnnnnnnnnnnnnnnnnnnnnnnnnnnnnnnnnnnnnnnnnnnnnnnnnnnnnnnnnnnnnnnnnnnnnnnnnnnnnnnnnnnnnnnnnnnnnnnnnnnnnnnnnnnnnnnnnnnnnnnnnnnnnnnnnnnnnnnnnnnnnnnnnnnnnnnnnnnnnnnnnnnnnnnnnnnnnnnnnnnnnnnnnnnnnnnnnnnnnnnnnnnnnnnnnnnnnnnnnnnnnnnnnnnnnnnnnnnnnnnnnnnnnnnnnnnnnnnnnnnnnnnnnnnnnnnnnnnnnnnnnnnnnnnnnnnnnnnnnnnnnnnnnnnnnnnnnnnnnnnnnnnnnnnnnnnnnnnnnnnnnnnnnnnnnnnnnnnnnnnnnnnnnnnnnnnnnnnnnnnnnnnnnnnnnnnnnnnnnnnnnnnnnnnnnnnnnnnnnnnnnnnnnnnnnnnnnnnnnnnnnnnnnnnnnnnnnnnnnnnnnnnnnnnnnnnnnnnnnnnnnnnnnnnnnnnnnnnnnnnnnnnnnnnnnnnnnnnnnnnnnnnnnnnnnnnnnnnnnnnnnnnnnnnnnnnnnnnnnnnnnnnnnnnnnnnnnnnnnnnnnnnnnnnnnnnnnnnnnnnnnnnnnnnnnnnnnnnnnnnnnnnnnnnnnnnnnnnnnnnnnnnnnnnnnnnnnnnnnnnnnnnnnnnnnnnnnnnnnnnnnnnnnnnnnnnnnnnnnnnnnnnnnnnnnnnnnnnnnnnnnnnnnnnnnnnnnnnnnnnnnnnnnnnnnnnnnnnnnnnnnnnnnnnnnnnnnnnnnnnnnnnnnnnnnnnnnnnnnnnnnnnnnnnnnnnnnnnnnnnnnnnnnnnnnnnnnnnnnnnnnnnnnnnnnnnnnnnnnnnnnnnnnnnnnnnnnnnnnnnnnnnnnnnnnnnnnnnnnnnnnnnnnnnnnnnnnnnnnnnnnnnnnnnnnnnnnnnnnnnnnnnnnnnnnnnnnnnnnnnnnnnnnnnnnnnnnnnnnnnnnnnnnnnnnnnnnnnnnnnnnnnnnnnnnnnnnnnnnnnnnnnnnnnnnnnnnnnnnnnnnnnnnnnnnnnnnnnnnnnnnnnnnnnnnnnnnnnnnnnnnnnnnnnnnnnnnnnnnnnnnnnnnnnnnnnnnnnnnnnnnnnnnnnnnnnnnnnnnnnnnnnnnnnatttcaattacgagggttatcccgcgaagcgcaactctctaccatgagctcatccacctcgtcgttggtactgacaaaacacaagattacacttgtaagttcttgtcggatatgttaggtcagaccaacgctgataacctgaagacgaatggagtaagatgcaaactgcgctcaagaagcccaatggtacgccgtcgaagaaagaagaggaaaaaactgggcaatattgggatggaatgaaatatcaggatatcatgcgtcaaaatcctgagacatttgtcttcttcagcgtggggtattggtattttctgcagactacatggaacaagaatgcgcggaagcggtggagcttcgatactggtgcagctcggctcgtggcgatataggcaaatgacgaaaatggaaatggacattttctagaagcgaaatcgacaaatttggtacacaatcactgttcaaagtttgacagggccttgaaagctgcctttttgcttctttcttatatacagttgcatagaaagcactttgggatttgggacttcacacttgtcctcgcttgttttcacttgtttgtcgctggtttgtttcgtataattttgtacggcagaatacggagtaagatcgtgagagttgctctattaagggtatgaggaatttagtagtagtcgctaccaatagcaaagagtaaatttcaaatcaaaaacaaagacattcaagcaagagtgattggcttgaaatcacaaaactcttccttccattccaaggctccgacgctttctagcttatcaacaaacttctctagtagggttctcgcgtcccacataagatagccactgttggaatatttcccaacatgcctatactcggcgctctttgcgtccgtccagaagtgcggccatagcatcaactgagcttcttggccatgcacgagctctgttccaatggcccatatctttaatggaaggtcggtttgacgacgcttcacaccatgccgcacaccgccaatccctgcagccggttcacgaataccaatcaaatccgaaatctgagtcttctgggcatcggtcactggtgtcaaaaagtatatccagaacaattccacgtaagagcacgttaacgcatcaaaccagctagggcccacatagtcggagctcctctgcgaaaatgtctctcgagaggacgtagctctgattcctctagcttcgaggttctcccgatagagctgggcggaaggcgaggccatgaatgccctcatatccgaggctctctcccatgcttggtggcagttagcgggacgacctttgattcccggttgatacacaactcacctgtaactaaaagaattgtatccgggcgctcctgcactcttgcatacccggaaccctcgtgccctggggcccgaagcagtggctggaaatgtccagcccattcggtatccagctccagtcccttggaaacttgaaactcggtccagattaggattgcttggtcgttgaggtcgtcaacctgtgatcgatctatagtatcatctcccaagggcgccatgactggagagggttgattcggatctgaacaggatttttggagagaacgactgggggcactggggttttactaagggcactagcgctagcgttgtttcgcctttggccactattcaacgcggtccctttcgtttcaatactggtaatgctatggtaaataaaccacgtgacatttctccttggcgttgtgagaaatcatattagtcaccatacttcgaatattgaagctatttgttagagtggtcacgtgattagcatgtgatcagccacgtgatcccaccgagtcctagccaatgagactataccgccgccaagtgcggttgagaaatctgggtttttacaaggatgcggctagtgatgggcgcattgctacagacgttgtgaatcaaagcacttcattactcccaccgttcatgcacgcgagactaaggccgtgcgttgatcaccagagccggataatcccgcaatcctctcagagttgactccgctttgaaatcgtaaatcaaacccgcctgagacaggaggtcagtaatatcccgaatacacaatttattagcgcccggcagctaagccgaaagggcaactatctttgatctactatacatgtcataatatatatagtacgatgtctcctccgagcccatacatgaagccttgcaatatatgtcatctcagatgtccgtatcgcagcggatcctcgtgggttagtaattgtgttagtaggctggcttgaaggcgcttctccaagtattcaacatcctattttcggcagttgaagcgcgtctaccgtctgtaacacgaggtggttggtgggttagatcggcgaaaggggggtgatttatgttcgtcggcgtggttaggtggcctcgagtcggcccgtggcgatggcgaatcgtattgaggcccgtaccgcgtctaagttcggcgtccacttctgatcatcggaaggcgactttcctcctaggaagaaggatatgtttcctcggtaggtgttggtacattgtaatagttccatccggtgcgccgtccatttttgacatcgaaataggaagtgnac

SEQ ID NO: 10 - DNA, 2509514 bp, Penicillium roqueforti (residues 1-1,254,757 of 2,509,514)
  misc_feature (1216)..(6722): n is a, c, g, or t
  misc_feature (98825)..(99196): n is a, c, g, or t
  misc_feature (140333)..(140428): n is a, c, g, or t
  misc_feature (294676)..(294851): n is a, c, g, or t
  misc_feature (357686)..(357871): n is a, c, g, or t
  misc_feature (461240)..(461316): n is a, c, g, or t
  misc_feature (472832)..(473013): n is a, c, g, or t
  misc_feature (615983)..(616264): n is a, c, g, or t
  misc_feature (740673)..(740781): n is a, c, g, or t
  misc_feature (916608)..(916744): n is a, c, g, or t
  misc_feature (1075775)..(1075920): n is a, c, g, or t
  misc_feature (1090226)..(1208726): n is a, c, g, or t
  misc_feature (1220316)..(1220357): n is a, c, g, or t
  misc_feature (1222717)..(1222890): n is a, c, g, or t
  misc_feature (1322402)..(1322472): n is a, c, g, or t
  misc_feature (1378583)..(1378955): n is a, c, g, or t
  misc_feature (1383626)..(1383985): n is a, c, g, or t
  misc_feature (1417670)..(1417930): n is a, c, g, or t
  misc_feature (1457652)..(1457846): n is a, c, g, or t
  misc_feature (1553838)..(1553908): n is a, c, g, or t
  misc_feature (1556740)..(1556844): n is a, c, g, or t
  misc_feature (1568441)..(1568536): n is a, c, g, or t
  misc_feature (1711694)..(1717436): n is a, c, g, or t
  misc_feature (1762554)..(1762695): n is a, c, g, or t
  misc_feature (1946431)..(1946528): n is a, c, g, or t
  misc_feature (1957031)..(1957153): n is a, c, g, or t
  misc_feature (2133678)..(2133781): n is a, c, g, or t
  misc_feature (2257081)..(2257239): n is a, c, g, or t
  misc_feature (2268380)..(2268411): n is a, c, g, or t
  misc_feature (2288724)..(2288892): n is a, c, g, or t
  misc_feature (2342113)..(2342131): n is a, c, g, or t
  misc_feature (2431724)..(2432069): n is a, c, g, or t
  misc_feature (2439433)..(2439883): n is a, c, g, or t
  misc_feature (2445715)..(2445859): n is a, c, g, or t
  misc_feature (2483152)..(2483360): n is a, c, g, or t
  misc_feature (2509508)..(2509509): n is a, c, g, or t
  misc_feature (2509511)..(2509512): n is a, c, g, or t
ttaaggtaagaaaaataagtcctacttagttaagtagtatggctataacgatattaaagtaacctaggaaccgcaatctataattaaggatactaaggcccttaataactataaggctaagttaactatagtaacgaaaataccgaagaagaataggactaagaatatatacccgaaatataagaagctttaattatagattaaaatttagtactacgtttcctatacttatatataggtataggtagggttattatatctaaccagactcaaatactaacagagcagtattaaaaatataataaagcagcgaaacagactctatacttagggtatcctaggaagtaggggctaagtttatagggataaataaagcgttactaggtatacctatattagaaactacgctttcttccgtaatactagtaggagtatcgaagaattcctcagctttagagatttcccctatattctctataactcctagggccctaataactttagcgaccactgtaacctctgcggcttttataatagtagtagcctttttagccttattagctatataggttaagcgcttaacattctactcgataatatatacttagggtatacgagtatatataggtgatatattaagagcggtataggtagtagactaaaccttagaaggaagctatactattattaataacgaattccttcctataataatatagttaaaaaacttataaggatataactgtactttacagaagagtagtaaatatatttagtataacctataagggtcttatacttatggtctaggtagctttataactggaaaaagtaccgctagtaaggtaatagcctctcgataggcttaggggtttctaagtatagaggtagagttataggcctatagcctactaaaagataacgttatacctatagatatagagatttatcctccttagaggaggatagtataggacagcaatatactattactattttataaatatagttagtatataaatataaaaataaggccgttttctataaggaagggacagatataatattaaaatttcttagtatactatatagaatgtaatactactaaatctaaagatatatctactatatttactagctaatagtaataccctaactagaataatattatcttaatagaagtataatagaaatttaatagaaatataaattaggnnnnnnnnnnnnnnnnnnnnnnnnnnnnnnnnnnnnnnnnnnnnnnnnnnnnnnnnnnnnnnnnnnnnnnnnnnnnnnnnnnnnnnnnnnnnnnnnnnnnnnnnnnnnnnnnnnnnnnnnnnnnnnnnnnnnnnnnnnnnnnnnnnnnnnnnnnnnnnnnnnnnnnnnnnnnnnnnnnnnnnnnnnnnnnnnnnnnnnnnnnnnnnnnnnnnnnnnnnnnnnnnnnnnnnnnnnnnnnnnnnnnnnnnnnnnnnnnnnnnnnnnnnnnnnnnnnnnnnnnnnnnnnnnnnnnnnnnnnnnnnnnnnnnnnnnnnnnnnnnnnnnnnnnnnnnnnnnnnnnnnnnnnnnnnnnnnnnnnnnnnnnnnnnnnnnnnnnnnnnnnnnnnnnnnnnnnnnnnnnnnnnnnnnnnnnnnnnnnnnnnnnnnnnnnnnnnnnnnnnnnnnnnnnnnnnnnnnnnnnnnnnnnnnnnnnnnnnnnnnnnnnnnnnnnnnnnnnnnnnnnnnnnnnnnnnnnnnnnnnnnnnnnnnnnnnnnnnnnnnnnnnnnnnnnnnnnnnnnnnnnnnnnnnnnnnnnnnnnnnnnnnnnnnnnnnnnnnnnnnnnnnnnnnnnnnnnnnnnnnnnnnnnnnnnnnnnnnnnnnnnnnnnnnnnnnnnnnnnnnnnnnnnnnnnnnnnnnnnnnnnnnnnnnnnnnnnnnnnnnnnnnnnnnnnnnnnnnnnnnnnnnnnnnnnnnnnnnnnnnnnnnnnnnnnnnnnnnnnnnnnnnnnnnnnnnnnnnnnnnnnnnnnnnnnnnnnnnnnnnnnnnnnnnnnnnnnnnnnnnnnnnnnnnnnnnnnnnnnnnnnnnnnnnnnnnnnnnnnnnnnnnnnnnnnnnnnnnnnnnnnnnnnnnnnnnnnnnnnnnnnnnnnnnnnnnnnnnnnnnnnnnnnnnnnnnnnnnnnnnnnnnnnnnnnnnnnnnnnnnnnnnnnnnnnnnnnnnnnnnnnnnnnnnnnnnnnnnnnnnnnnnnnnnnnnnnnnnnnnnnnnnnnnnnnnnnnnnnnnnnnnnnnnnnnnnnnnnnnnnnnnnnnnnnnnnnnnnnnnnnnnnnnnnnnnnnnnnnnnnnnnnnnnnnnnnnnnnnnnnnnnnnnnnnnnnnnnnnnnnnnnnnnnnnnnnnnnnnnnnnnnnnnnnnnnnnnnnnnnnnnnnnnnnnnnnnnnnnnnnnnnnnnnnnnnnnnnnnnnnnnnnnnnnnnnnnnnnnnnnnnnnnnnnnnnnnnnnnnnnnnnnnnnnnnnnnnnnnnnnnnnnnnnnnnnnnnnnnnnnnnnnnnnnnnnnnnnnnnnnnnnnnnnnnnnnnnnnnnnnnnnnnnnnnnnnnnnnnnnnnnnnnnnnnnnnnnnnnnnnnnnnnnnnnnnnnnnnnnnnnnnnnnnnnnnnnnnnnnnnnnnnnnnnnnnnnnnnnnnnnnnnnnnnnnnnnnnnnnnnnnnnnnnnnnnnnnnnnnnnnnnnnnnnnnnnnnnnnnnnnnnnnnnnnnnnnnnnnnnnnnnnnnnnnnnnnnnnnnnnnnnnnnnnnnnnnnnnnnnnnnnnnnnnnnnnnnnnnnnnnnnnnnnnnnnnnnnnnnnnnnnnnnnnnnnnnnnnnnnnnnnnnnnnnnnnnnnnnnnnnnnnnnnnnnnnnnnnnnnnnnnnnnnnnnnnnnnnnnnnnnnnnnnnnnnnnnnnnnnnnnnnnnnnnnnnnnnnnnnnnnnnnnnnnnnnnnnnnnnnnnnnnnnnnnnnnnnnnnnnnnnnnnnnnnnnnnnnnnnnnnnnnnnnnnnnnnnnnnnnnnnnnnnnnnnnnnnnnnnnnnnnnnnnnnnnnnnnnnnnnnnnnnnnnnnnnnnnnnnnnnnnnnnnnnnnnnnnnnnnnnnnnnnnnnnnnnnnnnnnnnnnnnnnnnnnnnnnnnnnnnnnnnnnnnnnnnnnnnnnnnnnnnnnnnnnnnnnnnnnnnnnnnnnnnnnnnnnnnnnnnnnnnnnnnnnnnnnnnnnnnnnnnnnnnnnnnnnnnnnnnnnnnnnnnnnnnnnnnnnnnnnnnnnnnnnnnnnnnnnnnnnnnnnnnnnnnnnnnnnnnnnnnnnnnnnnnnnnnnnnnnnnnnnnnnnnnnnnnnnnnnnnnnnnnnnnnnnnnnnnnnnnnnnnnnnnnnnnnnnnnnnnnnnnnnnnnnnnnnnnnnnnnnnnnnnnnnnnnnnnnnnnnnnnnnnnnnnnnnnnnnnnnnnnnnnnnnnnnnnnnnnnnnnnnnnnnnnnnnnnnnnnnnnnnnnnnnnnnnnnnnnnnnnnnnnnnnnnnnnnnnnnnnnnnnnnnnnnnnnnnnnnnnnnnnnnnnnnnnnnnnnnnnnnnnnnnnnnnnnnnnnnnnnnnnnnnnnnnnnnnnnnnnnnnnnnnnnnnnnnnnnnnnnnnnnnnnnnnnnnnnnnnnnnnnnnnnnnnnnnnnnnnnnnnnnnnnnnnnnnnnnnnnnnnnnnnnnnnnnnnnnnnnnnnnnnnnnnnnnnnnnnnnnnnnnnnnnnnnnnnnnnnnnnnnnnnnnnnnnnnnnnnnnnnnnnnnnnnnnnnnnnnnnnnnnnnnnnnnnnnnnnnnnnnnnnnnnnnnnnnnnnnnnnnnnnnnnnnnnnnnnnnnnnnnnnnnnnnnnnnnnnnnnnnnnnnnnnnnnnnnnnnnnnnnnnnnnnnnnnnnnnnnnnnnnnnnnnnnnnnnnnnnnnnnnnnnnnnnnnnnnnnnnnnnnnnnnnnnnnnnnnnnnnnnnnnnnnnnnnnnnnnnnnnnnnnnnnnnnnnnnnnnnnnnnnnnnnnnnnnnnnnnnnnnnnnnnnnnnnnnnnnnnnnnnnnnnnnnnnnnnnnnnnnnnnnnnnnnnnnnnnnnnnnnnnnnnnnnnnnnnnnnnnnnnnnnnnnnnnnnnnnnnnnnnnnnnnnnnnnnnnnnnnnnnnnnnnnnnnnnnnnnnnnnnnnnnnnnnnnnnnnnnnnnnnnnnnnnnnnnnnnnnnnnnnnnnnnnnnnnnnnnnnnnnnnnnnnnnnnnnnnnnnnnnnnnnnnnnnnnnnnnnnnnnnnnnnnnnnnnnnnnnnnnnnnnnnnnnnnnnnnnnnnnnnnnnnnnnnnnnnnnnnnnnnnnnnnnnnnnnnnnnnnnnnnnnnnnnnnnnnnnnnnnnnnnnnnnnnnnnnnnnnnnnnnnnnnnnnnnnnnnnnnnnnnnnnnnnnnnnnnnnnnnnnnnnnnnnnnnnnnnnnnnnnnnnnnnnnnnnnnnnnnnnnnnnnnnnnnnnnnnnnnnnnnnnnnnnnnnnnnnnnnnnnnnnnnnnnnnnnnnnnnnnnnnnnnnnnnnnnnnnnnnnnnnnnnnnnnnnnnnnnnnnnnnnnnnnnnnnnnnnnnnnnnnnnnnnnnnnnnnnnnnnnnnnnnnnnnnnnnnnnnnnnnnnnnnnnnnnnnnnnnnnnnnnnnnnnnnnnnnnnnnnnnnnnnnnnnnnnnnnnnnnnnnnnnnnnnnnnnnnnnnnnnnnnnnnnnnnnnnnnnnnnnnnnnnnnnnnnnnnnnnnnnnnnnnnnnnnnnnnnnnnnnnnnnnnnnnnnnnnnnnnnnnnnnnnnnnnnnnnnnnnnnnnnnnnnnnnnnnnnnnnnnnnnnnnnnnnnnnnnnnnnnnnnnnnnnnnnnnnnnnnnnnnnnnnnnnnnnnnnnnnnnnnnnnnnnnnnnnnnnnnnnnnnnnnnnnnnnnnnnnnnnnnnnnnnnnnnnnnnnnnnnnnnnnnnnnnnnnnnnnnnnnnnnnnnnnnnnnnnnnnnnnnnnnnnnnnnnnnnnnnnnnnnnnnnnnnnnnnnnnnnnnnnnnnnnnnnnnnnnnnnnnnnnnnnnnnnnnnnnnnnnnnnnnnnnnnnnnnnnnnnnnnnnnnnnnnnnnnnnnnnnnnnnnnnnnnnnnnnnnnnnnnnnnnnnnnnnnnnnnnnnnnnnnnnnnnnnnnnnnnnnnnnnnnnnnnnnnnnnnnnnnnnnnnnnnnnnnnnnnnnnnnnnnnnnnnnnnnnnnnnnnnnnnnnnnnnnnnnnnnnnnnnnnnnnnnnnnnnnnnnnnnnnnnnnnnnnnnnnnnnnnnnnnnnnnnnnnnnnnnnnnnnnnnnnnnnnnnnnnnnnnnnnnnnnnnnnnnnnnnnnnnnnnnnnnnnnnnnnnnnnnnnnnnnnnnnnnnnnnnnnnnnnnnnnnnnnnnnnnnnnnnnnnnnnnnnnnnnnnnnnnnnnnnnnnnnnnnnnnnnnnnnnnnnnnnnnnnnnnnnnnnnnnnnnnnnnnnnnnnnnnnnnnnnnnnnnnnnnnnnnnnnnnnnnnnnnnnnnnnnnnnnnnnnnnnnnnnnnnnnnnnnnnnnnnnnnnnnnnnnnnnnnnnnnnnnnnnnnnnnnnnnnnnnnnnnnnnnnnnnnnnnnnnnnnnnnnnnnnnnnnnnnnnnnnnnnnnnnnnnnnnnnnnnnnnnnnnnnnnnnnnnnnnnnnnnnnnnnnnnnnnnnnnnnnnnnnnnnnnnnnnnnnnnnnnnnnnnnnnnnnnnnnnnnnnnnnnnnnnnnnnnnnnnnnnnnnnnnnnnnnnnnnnnnnnnnnnnnnnnnnnnnnnnnnnnnnnnnnnnnnnnnnnnnnnnnnnnnnnnnnnnnnnnnnnnnnnnnnnnnnnnnnnnnnnnnnnnnnnnnnnnnnnnnnnnnnnnnnnnnnnnnnnnnnnnnnnnnnnnnnnnnnnnnnnnnnnnnnnnnnnnnnnnnnnnnnnnnnnnnnnnnnnnnnnnnnnnnnnnnnnnnnnnnnnnnnnnnnnnnnnnnnnnnnnnnnnnnnnnnnnnnnnnnnnnnnnnnnnnnnnnnnnnnnnnnnnnnnnnnnnnnnnnnnnnnnnnnnnnnnnnnnnnnnnnnnnnnnnnnnnnnnnnnnnnnnnnnnnnnnnnnnnnnnnnnnnnnnnnnnnnnnnnnnnnnnnnnnnnnnnnnnnnnnnnnnnnnnnnnnnnnnnnnnnnnnnnnnnnnnnnnnnnnnnnnnnnnnnnnnnnnnnnnnnnnnnnnnnnnnnnnnnnnnnnnnnnnnnnnnnnnnnnnnnnnnnnnnnnnnnnnnnnnnnnnnnnnnnnnnnnnnnnnnnnnnnnnnnnnnnnnnnnnnnnnnnnnnnnnnnnnnnnnnnnnnnnnnnnnnnnnnnnnnnnnnnnnnnnnnnnnnnnnnnnnnnnnnnnnnnnnnnnnnnnnnnnnnnnnnnnnnnnnnnnnnnnnnnnnnnnnnnnnnnnnnnnnnnnnnnnnnnnnnnnnnnnnnnnnnnnnnnnnnnnnnnnnnnnnnnnnnnnnnnnnnnnnnnnnnnnnnnnnnnnnnnnnnnnnnnnnnnnnnnnnnnnnnnnnnnnnnnnnnnnnnnnnnnnnnnnnnnnnnnnnnnnnnnnnnnnnnnnnnnnnnnnnnnnnnnnnnnnnnnnnnnnnnnnnnnnnnnnnnnnnnnnnnnnnnnnnnnnnnnnnnnnnnnnnnnnnnnnnnnnnnnnnnnnnnnnnnnnnnnnnnnnnnnnnnnnnnnnnnnnnngattatgggtttcccggcccattggtgggctgggctgggctgggctatgggctgggtgggctttgccgatgtctacctataagtaactttaagaatactcccgaaaagatcaagcagttctatgatcagtacccgtagaagcctagaccaccgatacgattataagaatagaccgatactgcagataaggatagattcttagataaccacgttaacgataataaacctgcatttaggggctaaatgcattcttagccgggggttatataatgatctaagaggatcgtacttgcctaacggggcaggagcggtcacgtcctcgtacttgccgtaggaacgactataccctcgcaccttcctaaaagaacgaacgagaattaagtgagacaaacgcaagagtataagaaggaaagaacacgcacttagatagtttctctttttcctttcttcctcgtacttagaatttggttggaattgcactcttttcctttgaattgaattggctcgtaacaggtatggcgagagcgaggtccttatcgttgaggtaaagggcggcgctaaggggagcaatcctattccctaactcctcggatatatgggttatatctcgctatatgtattaaactatatttaagcaagctaatcggtatgaaagggtgcatccaccgtggacgtaaggacgagcagaagcgcaactgcagtgtctacggtatggcgtatactggatccgttcggcattttttgaaaataagtcacgagtcaaaggtaagctggttaataccagcaaagaacacaactctaatatttattagcggtcggaatttgctactgtcggttgtcgaggcgctctcgagcagccgttcggtttgctagtatggatgctgcggagggcagctgccatctccccagcccactcaaaggaaaactcagcggaaacttatagtttggtggggtctgaggagatggtgtttgaatgagcggtgctgaggggaaggaggagtgttgtactgattcatggcgcagtgtggtgttggctgatacctcttcccccttctcacttgagtcagctcttatcgcgaggtcaccattactagttggttaatctcttaatacaataacctcaaaaaggaagtgctcgcctcttactcccatgagttcgtgataagagtgctctaaatatttacatattgtattcctattcgaggaacatggccatcggtgcaccttcgtacaacatatactcatagctgcggaatcttggaacctcggaccagcgtgctgcgtacgtaatacgaggtttttaggttttcagggacaggcctggaattatagtaccgccttcctgatctagtactattcaggattctgccatatttctaccgcactttattttttccgccatgtacatatattctatggagacatgcattttgattagacaaaatcttatattctgcctaattcctgtagtattcaactctggatccggatctagcatatgaggcaagaaaagaaaactggagatttcatagttgggggcagcggaggataccgtatacgagggcttatctatttgaaatggcccccattctacagttacaggggtcctcacaaagaggccgaaaagcacaagagacaacgaaaaacatccaactggataagttcctcaatgttcgtcctgtcgagaatacgaagcctcccttcttccaattggtggccgcaaaaagtacctgaagggccttacgataagccctacgaatacctttcaaagcgcctcacaggacgccagcggggctcgaaagggccgtcaaaatcccaaggccccaattagaatgaatatcttcgattatacgctggaggtttattcggtacgatttgatccccattgctacttttcatactgtgacggtgtactccgtacagaaatttgtgtgcagataaggaagctagataacccgtcggagcttacgggctagccaaacgttctaaccgctttagcctgacttatacgtaaggtagagcggcctcggcatgttcgggattcgagaccaatgtcactctccatagagagaggaaaagcttctttgtgtctgcgttgaacttactccatactgagtacctggatcgagtggcgctccaatcgtagatttaagaatgatgcagtctgcagccaatacaatggtgttacccctcaacgtgccatgcatgctatgcatagggagtggaggtaatccagggtcaattactcttgatcacagcagggttgaatttttacagttttagtcgcaatgggaaccttggaatcacggaatactcgagaccgctctatcctgactattgggcagcgttgccctcactaggatcggcgcgtttgagatcggcgcgttgagatcggcggcctcaacgtcgggaactcaatgctattgatgagaccaagctttatggtccagcagaagctgcagaattttcacgccacggatctcagaacggcctatcattgggggaaaattatatggccaaacctggaccgtagtggaaaacaatgtggatgaaacttacataggtgaacacatgggatcgatttccttgccaagtaacctaattacctgccaagagccttggcaagccctagttcgggaagtggattctccagcacttatctacctcgtactccgtacggagtacgaggtactccgaggtactccgtatgtacgatgtatgtaactctgaaatatctacgcagctgataggtgggctattaattaacaaaaaggtgtgctccatgttttgcattacatagtgtagatcattttcattctatatgataatggccaaattacataattgtagggcggattgttgccaatgctgccatgtggacctttccggacatagcttccaatactttgattgatcgcccgagtaattaccctaaatctatcaaaagcccgagcttctggaagcgtatggagtaggtgtgagcatttcccattttatagccatgtgatcggtggtgttggcaatggcctaaattgctgatcagaagcgatcctaaaatccgattatcgtgtcgccctgcctagatccacttcatatgtggtttaagagacattatcattgattgaaagttcttcatgtagcgaaattcggagatttcatgtgaaattgtatagagatatactcagaatatgcatataatcacgctagtttattcgaaacggcgatcctgaaggttggcttatcaagatcatgccggtatattactgcattcggcaaaaggaaattcgaataatatcaaacagaaagtttaataacaaaaagctcaattgaaacaggagtccgattttgacattcggcctccggaaactccaatgtctatcaagaccctagactttcgatcacatcacggccctgagatgatagacgacatgatgtctctatctttgaccaataccatcctctcagctgtgtgatgtacaagctgatctatccgaccatgaacggaattccgtgggtagaccatgagtatcgggatgccctgcggatctttctcttctcagcctcgaccgagcttgccgccgtactttgcatggatgatttcgggatcacaatgaggtctgtgatgtaacttgcaagatgtcggtggatcgggtggatatcgttagtggatacagtaagctgtgaaggactcctacttttgggtctatatcaggtttgtagtgggtgttactagggaatggggcagcatataagtcgtgaaggacttctcctttttgggttgtgtatcaagttgagttgagacattatctgcacaaaagatatatacaatggcagacttatcaagatcttcgtatgttttgtgacatttatcatgatcttttttccacccctttttggatgtcctattgaagtttcttccaattctgaccgtcatacagacttatagaacagcttttacacctccgcagtgaggcctctcatccagactcttgccgtcaactctccgctctattatccctacacaccggctcttggcccatccgtcacctaatcctaacatttcaggacatttacaagtccattcccgaatccatcaaggccaacaacaatgaatcaattacctacctccgtgcacaagtcaaagcagccacccccagcgttgcggaattaatagggacagactcccgcgccggtctcatcgatgctaacaccggacggcatctgacacatattgccatacggcagttcttggagagtttccagcttcccgtgggactctcccgtcatggaaagcctcgcatcgctgtcatcttgcctaacggccctctgatggcagtcgctgttcttgctttcgtcaacaggtacaccattgtgcctatgacaacgaacacggtgccagagcaattacagacagatatagaaaactcgcaagctgatgctgttgtcgcgctggacgctgacattggcaagctgcagctgaacaatggcagtcggccagtgtttggtattgagcaacttgaagacatgactttccgggtggtctctgcgcacaatgcttctggtgcatacaaccatccccccaattctggggacgatatcgccattatcttgttcactagtggtactagtggtactaagaagctggttcccatcacaacttacaacctcatcgcgggtaccatggctaccatagagtcagtcgaactgtccgagacagatatctgtcttaatatgatgcctctgaaccatgtgtatgttccctgccaaattaaattataggaagacagctaacattatcagtggtggcatcatgcgaagtatcttctcacccgtactcgccggcggtgccacaatatgttgcccctcgtttgaccccagcatgttctgggatgccgtgcaaactcctcatatgacaccaacttggtactatgctacacctacaatgcaccagatgattcttgctgaagctgagcaccgccccgatgctgtcaagcaaagtgccatccagtttatctgcaacgctggtggtggtctccctccaacacttgccgtgcagctccatgatattttccactgcgccgtcctccccagttacggtatgactgaatgtatgcctattgccgcgccaccgaggagctacaagcttgatcgccatggaacatcgggaaagatcgtcggtcctgaggttgcaattctgaccgagagtggcgagcctgtccagcaaaatgggatgctaggacacatctgcattcgtggaccacccgcttttgaagggtatctgacccctggaggcaagattgacaccagtgcattcaacgaatccggctggtttgatactggtgatcttggacacctcgacgatgacaactacctgtacatcactggccgcagcaaggaggtcatcaaccgtggtggtgaaattatctctcccgtcgaagtggaaaatgcaatcctgaccacagccaaggatcctgaatccccgctgtatggtcgtgttactgagacgttagccttttctgtcccagacgaggtactgcaagaagttgtcggtgtggttattgtcacacctccgggcttcactaggccggatcttcgccagatacacgaagcactgcagcctattctccaccagcctaagtggcccgctctggtagtatacatggacggcgtgcccaaggcaaacaacaaaatccagcggatcaagctcgcagagcggctgtccctggatatcttgaccacggccacacccctggcaagcaggcactacgaagctgtctgcccacctactggcgctccactcagcgcatcaatctcgaagaacttgtgtgtcatcgatgataaaataatccgctcagttctcaccaagagagcaaatacccctgacatgcacgtgcaaataaacccgcgcgatgggctcgcacaggttattttgtttgtccagaacccagatgatgaccatgtgacacctggcgagctccacgaccacctccatggctatctcgtacctagccgtatcattccactcaaaggtcccatgcctctcgacttctacggaaaccccgactcggccgcgatcaatgaggccatccttgcccgcaactcggatggtaacctgtcgcccattcagcagcgcgtacgtgagattttcgctgtggccttgtcttgtgcaccagaggaagtatctcgtcttaccgacttttttgctgctggaggtgatagtcttagtgctggtcgaatggtttcgcaacttcgtcgcgaattcgctattttcctggccggtgacattctcttccaccacagcactgttggagagatagagcacaagatcattgaagctgttgaagttaaggctgccaagggcgacgatggagaagttgacttgcccggttgtgagaagacatacagcagcacgaacccaattatcttgctcctacacctgttaccgactgtgttctttttccccatgaaacgcgccttccaatggatcatgttcgcatatgtcgtggctgagtgctctaatcgatttcccattcgtgagaacctcttcgctcgtttgatgctggttgtttttgccgtgatgtctgctcgcttatgttcacaaattgtgtctcccatctttgctatcatctttaagtggctcgtcatcggtcgctacaaggagggcatgtcacccatgtggggcccgtaccatacgcgctggtggttgacccagaaggtattgcaggtgtgtggaaagggactcttcaacaactacaactggtcccgcattctcttctaccgtttaatcggcgcaaagattggcaaaaatgttaccatgtccgcgtccgctaagctcggcgagtatgatcttattgagattggcgataatgtcgttttggatacctgcatgtgtcgccccttcggcgtggagcgcaatacctctatgcttttgaagcgcattcgcattggcaaagactcgtcgatagggatcaagtctgtcatcgcccctggtgctgacatcccggagaggacctgcattggtcccaactcgtcgagctgggaacttcgggacgccgatgagtctaaccgccaattgctgacctcccagatccccaagcctcattggatctggattctctttattgttgagccaatcaagttgatcacctggacagctgctcgtattacctggatggccgctcttcttcctatggttctcgagttccctactcctgcggcagacatgttccggtctaccctagaatggtacaccagtgatcagcggattgcgttccacatcaccgcaaggatctgtcgtgctgttggtggcccgattgtgctttttattgcagtcttgatcatcaagttcttcctcgatctcatctgtggcaagcccagacctggtcctgcctcaaaacagaccactcgccaaaagattcggagtgcggtgcttgcgcagattctgcccgcaggtgacatccacggactcacccgccttactggtcgtcactacgaatttgtttcaatggctgtccgtgcccttggtggcaaggttggcaagcatgtctactggcctagtgttggtcccgtcactgtcgactttgatctcattgaggttggtaacgatgttgtttttggttctcgctcgactctggtcacatctgatggctacggccgtgatcgcatcgtgatcggtgatggcaccatggttggtgatcgtgtcgtcgctttgcccggtgctaccatcggccgtcaagcaatgataggctccggtgctttgcttcgccggaatggggactaccctgccaacagtgtctggactggtagcaagggtggtgaagctatacagttcccaagttccacctcgacctccacttcgaccgctccaaccatcatcggagatggtggcagcagccccaacactagcggcagcgaagacgagaaaacaccgaccgaaaagcagacctactgtggaactaaagacaaggctgttaccgagatcgctgagcaggaagtggatacatgcaagcctttcggtcgcgccttctaccgccacgaggccaactactacgtcctccgcatgtggcaaattgtcatctattccacttttgcagttattttcactactgtgtattggcttctcaccgtcttgttctcccttttcgttctccgcagtgtcctaagctacagtgatgctgctggtttcaagcaaggcgcctggcgcccattcgttctgtacggcacgctcgcctcgatcctatctgtcatcaccaccgttcaagtcgcccttgccttcggcattattctctgcatcaaatggacggtcgtgggccgtcgcaaggaaggctcctaccactgggacaagagcagctacaaccagcgctggcaattcctcctttcctgcgaaacgttgatcaaagactgctatgacggagttggtctcctgcccatgatctctggctctgcctacatttcctggtactaccgcctcttgggtgcgaacattggaaaggactgtgcgatacacgccaacggtagtcccagcatctttttcaccgagccggacctccttacccttggtgaccgtgttgctgtcgatgatgccagtttggtctgccacttgaactcccgtggtggattcgagctgcataccttgaacgttggggatcggagtatcctgcgcgctggatcgcgcttgatgtctggtgcttcgatgggccaggatgcttgtcttttagagcatactctggtcctgtccggagaccatgttgagaatggagatacgctccagggatggccggccgaaggatttgacgggaaacgtgtttagaagtcttagattgttttccatttcttggcgctttgtctttgtcctagagaacagatagactagcaattttagatcggacttctcagattttcattattgttatattgtcatcgagaagatcaagtgcattttaattatgaacagaaatatgccacttctatcacattcttatctgggaattactataccacacacccttttggaccacttcaggtaaggcctttcttatccctgttttgaagactcttttgaagactcttttttttacccatagacctcaactgcccattactcgtatttgtaggatcactataatctattatacgaatcacttcataatctagccggcgccagtatcatgcgacagcctttaattatcaattatttaccggttactttacgaactgcgttattatttcaccatgacggcttcaactgtaaatttcatacaatctactttctaactccgagcccaagatcgtcccgaatccctccccactcccccaccctcactccactttccgccccggctgtgataagaaccgagacaggccacgaggccggctccgacactcgtggtcggctccgacataggctccagcctccgacataggcccagtcgaggacgtagatactagaagggggaaaggcataaaaaccacggagtactccatagtataatcaaccttgcaagatacaaaaagggattgttacagggacccctccaattgctaattcgacccccctttgactaataggacccttgattctgctttattctgccttgcacataaggcaccactttaattctgccagccttaattctaaggcagaagaagaatcaagcggcagaatatatacccggaccttgccaagaccaggcaagtggcagaattctgcctcgacccgatcagaaaggcggtatgtactgaggtcaggtgcccgagattatctaaggcgtgccaaggcctcaagatcttatgcatctttggttttatttgcaattgccagttcctaaattccctgggattttggggatgttgttctttactttcctttgtgtattgctttgttgttcttgttcaaaatatgtcgataatctaattctaacccacctatcagcagatggaaatctggtaggttgaagtcctcaagatcaaccacgcaaagaaagaaatcgactaccctctggtgtttattcacaaagaagcctctaattaagtccaccaagaaatagcaagagaccaaagtgaatcatctttggtttctttgtcggtctaaatctctttggagtcgacatgatcagctttgggttttcggagatgctgttcttttccaaacatgccattggtctaatattatcttcttggctagagagtttataatcaaatcttaaaagcacccacatagactctttgatgaaactgtctggtttggatcctagttcttagatgcgtgttctaatgctaaaaatggaattgattctttgagcttatacttcggccttctggactcgggaccgacgttaccttgaggcatttcttatgggacttgcaaggaagctctcctcggatgcagctgtaaataagacgatgtccttcgcaatcgacaaatctaatacctattcccaatctcgagcctccctccttacctcttaccgtttccttccaaaactcatactttattcaccattgctttcctcgatatgcctgagccccagtggtctaacgctcaaatacctaaggggtttccccgagattggctaaaaacccacgacggctaaactgcacctatgccagaggtgcataagattcacctactgagttcaaattctgacgacactgatggactgaaaagctcaaagaccgaggatcctattgaacttccggttctcagcccgaacgatccggttaacgaaatgtataaagtggccctctcaacattcctgcacgaggaattccaaacaaactatatgataaaagacgaccctttgcattacgaacgacgctacgtcgtttggcccggcattgacttgaatagatttcgattaatcgacaccccagctagctttttccgagtgctagagatgtcgcttttgtccgaacatatatatgaaccagaagggaagaaatggccagtctcagccgcaaaaagacgcacgcgccttcttaagaacctttgggagcggggggatatacggcttgtcgatgagaagcccctcctcagtgaataccaagtgcgccgcgtggcatcgacaactcgttctgaagtcgagacatatcgagaatttcttcgttgccagcacttcaacatgggaaaagagatgattttccctgaactttgggaggaggaggaagaaggttggtattgggaggagaaaaaaaatcatttacatggctgtatacttgcttaatgctacctcgtgttctacatttctatttctctcagataagtatcttaccattgcctctgtcgctgcttgaactcctcaccccttcgtggattacatatctagttcgctcttgttaatgaatactctgggtctcttgcaatttcacttgtactttagcttgatcaaatcctatcatgatatgttcagatacacaaagaaccaagcaatgtaggattcagaatgtcctaccctctcaatcgagagagtcgttgcaagataaccaaacaaggaaaattgcgacaatttgttttagagtgcattgtcttagtctctcaaagcggtcgacaatggcctttggtttgaagtaatcagaatatggattaaggcataatccactaatttctatgggtgtaatacgtacacttagaaagacaagaagcggaaggttcaatggattcacacaattatatccactatctgctattcgcgccattgcgaatccgatatgaaattcgtcacatggaacttagaggagatctagttctttgaagcaatcactattgattctctttttgagacatccaactcatcatcgtgagttttacgtggacaaaggaaataataagcccagtcctgacgattgttggacagacaacaaatagcctattaaattgaagcgaaatgttgatatggtcgcatactggaacatgaaaccattgtacctagaatctgtgactatggggtacacgatttatcaattatagttgagactagacgtaataaagaaatgggttcagcacgtaaaaggctatactatataatttgtaagtactatcgctcatccgggggtttttattttcactcacttctccgatctcaccaaacatggaagttgttgctacggtcattagcatcacacgcgcattggtgtttgtgatcaatattttcgatgagtgccgacaattgattgtgaccaaagagctaggttatctccgtgatatggcagatggactgaggaccactctcagtcggaccaaaaatcctgctgaacttatcttgagacacacagatccctcgtctgtaagtgctaatggctacagggttctctgcgagggcctccaaaaaaaacttatcaacttcaagaagactgcaaagataatcaacgacaagcttcaaagtatttgtggcaaaacaggctctacgttttccaagaaccataagggtttggtaaagctcatacggctacaagccaacacacgactcttccgacggttgcaagatcgggtatcctcccatgcatcctccattggctccttgctgcttgccatggatacgtgagatttccgtaattcaatatcaagttactgactaaccattcatacctaggtactatcaaaaaggattccaggaaaagcttgatatcaagattgatcgcctgctgctgcttcaggaaaaatctcggctacccaatgagcttggcacccagcaggttggcacggccacctctttgcccaacaaaagcaagccattcaccattcctcgacttgccactgacttttatcgagagtggaatgattaattcgaggacttgttgcaaaagctcaacccttctttggttgagggccccgaatactcaaatcgaatgatatatatatctggcgatgcaggagtaggaaagacatacttgtgttctgaatttgcggagaagtacaagacttggtagggattttaccctatactctgcttcatatatatcttactccctattcaaagtcactccggcgttctttggattgatgatgttcttaatgacatctcagcattttatgttgagaacaaccgatttgagagcctcaacatcccaacacaggcggcagatgtggttaactggctgactggggttcatgggccatggcttttggtcattgatggcgctgaagatttgacaaaatggaaatgtctttcgtcttgcggtgacaaaaaaacactttcttatcacgaccagaacaacccaatcggacaccgctacctctgttcatatctcagggatggacactaaggattcacaggaattccttttgtgggccgcgggtttcttgaagccttggtttgtctcggatcttgcgtggagtaatgatctcattggcaaacttggttccaatgcgctaccccttgccttagcccatgtgggtgccacggtgcgcaatggcttttccaccccagaagactatctggcgctcttggaagagcaacagacaagggaaacacaagcagatccttcgcaagatttacaaaggttggcctttgaagtggctatcgcacaaattcgaaaacaaaaagatcagccatccaaggatgcacacaaactcctcaacgctttcgcctttttccccaatagacacatgtctttggagacagcaacaaaagcaatcatcacatccaggactattggcggggagcagcgacggagataccacaagagatatcccacatcaaaactcatcagacggaatgggaaagcctacaacacttctcaatctacatctcgtcggcaaagctcggattctgttgccctttcacgagttcactgggcgatcatggagctcctcgatatttccgcggttatatatcgcccaccaagtggtacatactcgatggaagctgtcttgaaaagctggatcgcagacagcctaggtcaatctgagcgcgaagtttggaaaaacttagctgacatgatagccccgcaaaaggcgtccaaagaatccctttgatagttttttgacagaatttccttgttccggatttagtttgttgtgttttcccttcttttcttcagtgtgagttggttatatagtcgaatctcataatcctatcttctagtttttccaatcttccagctgtgacgagccaagtcttgcaaagatggaagagtgcatcaattcaaaataactaagataggggagaaagaagaagcaaggtgcaaagtgggaaacagccagttcttatagctgaccactttgtagacaatgtaaacaaccaaagaaacaaacaagcaaacgttgcgatcgtaacaccagccttcattcttggattcacccatttacctagatatctgcctgatgagacttgaacttttctcaaaccttcttttcatttattgaagatacgaaggtgtatagcggccaacagccatgcctgattttaatggtttttacggagcccgttgatcaattagtcaacaatagtcttgtgcaagggatttctcatagtcaggaacattttatatttcataccagtaattagtcgtcgcagagcaaagcgacttattctgacttctaatgctacgcaaagtatgactgtagaagctctgggaaagataatgatggttcgttctctaggtatggaccgtcgggatatgcccgagaggcccacgtgaccgtatgatcacaatctaaccaaattaggcctagtctatatttattctgccaaaggacatttcaccgcatagtttcccatgaacttcgaccccagtgaagaagaggatgttcacatgacatcgagattatgattcattgttgctttgcttcactccgcaaaaagtataggagctagttttcttgaagttgctgttatataagccattcatggaggcatcttaggcacctcaccaatgaccaatagcgaaaacaagaatagactccaccctctagggcttcgaagagccactgctcacaagacttctatatccttccccgccccgttgctttcatctcttaaacgcatcgagtggaactaacttttaaataaggatcatacgggatttcggctataccatgctgcaagtgagagtgccacgaaaaggtctagcctatagtgatgtctgagtaccatgcacttcccggtgatgtgtccaatttcctccagtagcaatttccgtctgccgcctcttgcgtaaataagattttataccccacgccaacaggtctaccccgcaaaattactatttagagcgctgatagtgcggggatagtagactaatgcactgagagaacgccacaatataggctgaatcatgtttcccggccaatccgaatctgagtgaatcataatatcacttcacttcattagactctgttatgtacggttctttagagtttgaagcaattaccgattattccgcaacaaattttgggaagagaaacagctaaaaatatggcattgaacgcagattcgttccctggtatacaattccgtaagccagggatatgtacatataaatgggtatagctagtaacgtaggataatatcgagagaactaatattctcgtcttttgccggatgagttcaacaaactacttttcatcccccacgcagacgttccttgaccataccccgcctaggagaatgggggtaaagggatagcaaagattcctggagatattttcctcgtatagaatctgtaagagattggtctcggcaatcaaatgagctgatgccagccgtacatgaaatgcggggaacttcacagaaagcgcttcagggaggtattggctttgggctgtttgagatagtcaacctgaaagataggacataatgatcagcagtttctctttcaatgtgctgcaatggtcatgtttttgttattctcaacatgctgatacagtgtgtttgactggacagagctggacaacacattacttggagtgcgttggatcaacgtactttttgacaaagatgagtctgatgttagccaccctccagtacttgaactctgtctccgcgcgcggggtcaatgtagaaggctattggctgtgcatatgggttgagatggggaaattgcctctgtagatacttccacgggcacacaagcacagctatataaggcccctctggtaggtcccatcagaagtctacttattccctcgagcactttcttcataatcattctcaattgctatattgtcaacatattcagagttatgactatcccagacgaagttgatatcatcatctgcggtggcggcagctcgggatgtgtccctgcgggccgcctcgcgaatcttgatcacaacctgtctgttttgttgattgaggcaggcgaggataacttgaacaatcaatggtgagaatgccgaggctaccagtcttaatgaacgtattctcatttcaacctagggtgtaccgcccgggtatatacccgaacaacatgaagcttgattcaaagacggcatcattctatcactccaggccatctgagcatttagatggtcgccaggctattgttccatgtgccaacattcttggaggtggcagttctatcaactttatggtaagtgatacctatctgacagtttgactcagtgatcctaagctgaatacattaaagatgtataccagagcatccgcgtccgattatgacgactttcaagcaaagggttggacaaccaaggaacttcttccattgatgaggaagcacgaaacataccaacgtgcgagcaataacccggaattgcatggcactgacggacccatcaaggtttcatttgggaactatacgtatccgatcaagaatgacttccttcgtgctgctgagacgcaaggaattccattcactgatgacctgcaagacttgaaaactgcgtacgagctccacgatagatctcctattttatcttactaacgaagagtcgtaatgttacagccacggttcggaacactggttgaagtggatcaaccgtgatacgggtaagaacgaaggtccaactttgcatcggtatcattacctctctcacactcagtattaggacgacgaagtgatgcagcccacgcctatgtccacagcacccgagccaagcataataatctccatctccaatgcaataccaaagttgagaaggtgattgttgaaaatggtcgtgccgtgggagttgtgacagtcccaactaagcctcttgacggcggagagccagttcgcagggtcttcaaggcccgaaagcaaatcattattagttcgggtacactgagttctccactgattctccagcggtccggctttggtgatcctgagaagctgcgccgggctggggtcaagcccctggtcaacctaccaggcgtcggccgaaacttccaggaccactaccttactttctccgtttatcgcgctaagcccgacgtcgagtcctttgacgacttcattcgtggagatcccaaagttcaaaaaaaggtcttcgatgaatgggataagaagggcaccggtccattggccactaacggtatcgatgccggggtcaagattcggcctacggagcaagagctcggcgagatgaagaagtggcctaccccagactttacagaggggtatgagtcgtatttcaggaacaagcctgataagcctgtcatgcattactcgatcatttctgggtaagcatctcattcgcttcgttttgaatgccacgaggctaacccacggatagctggttcggagaccacatgcacatgcctccgggcaagttctttaccatgttccatttcctggtatggttcaaagtcaccaaatcagatcagccaaagctgacaacataataggaataccccttctcgcgcggtcacacccacatccagtcggctgacccttacgaagtcccggactttgatgcaggtttcatgaatgacaaacgtgacatggcacctctggtctggggatatattaaatctcgtgagaccgcccggcgcatgggttcgtacgctggagaggtcactgccatgcatcctcagttcgccttcaactcatcggcacgggcgcaagatatggatttggccactaccaaggcatatgccggctccaaccatatttctgctggtattcaacacggtatagtcttcctttccagtcgagttatcccgtccgtctagctaatcaaataatataggttcttggaccactccattggaacccggaaagcagccttcggcttcaactctcaactccaatagacacgaagctcgtccttcgctggagtacaccaatgaagatatccagcacattgagaagtggagtaagtatcaagcatagtaattggtagccccggatcatattgtctaacgcttttgctgcagtttcccgccacgttgagacaacttggcattgccttggcacatgcagtatggctccgcgagagggtaattccattgcaccccatggaggtgtcgttgacgagcgcctcaatgtgcatggtgtcaagggcctcaaggtttgcgacttgtctatctgccccgacaatgtgggctgcaacactttcagcgtgagtgttatgtttgttggttactctgggtttggccaaatactgactattatatccgatagaccgctctccttatcggtgaaaagtgcgcagtcttggttgcggaggaccttggctattctggggccgatctggatatgaagatccctacttaccatgctccagcagaattctccaatctttctcgcctttgagtttcttttttgacgtgaaccgaagaacatgttctaggatatttcattctattcggcgagaagaagttccgtcctcattgtcaaattgaattaacatagtcatttcactgaacagttaatctgaaaataaagaaccaggtaaaccgacttatattagctaaacgtcatagaggaattcagaaacgagaggaagtggagatagacagttgaagggaagatggcatttgtgatgtgtatgtatgccttcggccgctagtgttggtgcctcagtttagtctagaccaggtaactagccgtcttacagtactcataccataccatcccacggctaacaactgttagttgactatggacatcttccaaggttatgtagttactagcccccgactccctactaggaagttagtaggaactatgtaccagtactaatctagtgatagctgactggtaaacaaaactttattttcctaggccaagtacaatatatgactgttcataagttttaacagcccctagccccacacccctgatttatataatattctgcctatctaaaacaccataatagtacagagtaagtaggggtgacggcgaaaagaccacgattgtgcgtggtcttttgaggggaaatcgtggtcctttcacccagcgctcgcgttagagcattgaatataatactagccaagttaggcttagcgcccttataggagtaagtatttatcatatatcaacgccccaaatcaaaagcggtaaggcgtgggcggcaaggcagataattaaatcggtgaatgccaagacggcaaaacaatcggccgcatgacaggcgaaggggcgcttcatctccaatctcgagctcccctgcagctgacaatccggaaaaaggagaccagcagtctgatatgttccgagtcttgcggcgattgggagtcccttcgccaatcattcagcattgtcgatttcgttgcccatctcgaccattatccgagatgggaaacaagaacagcgcaccttcgccacatacctggctcgacagcacatccccaggaacagatttgcaagaactgactcgtcgttagtagcttacactcaccggaattgactaacaagttagtatgtcactgactttgtattgtaggacatgatccgcattcgtattccggtggaagatggctcaatcgggacgagctcgagcgaaactctcgccacgttatgtttgacttctcagcgctgtgtgagcgggctgttcacatatgtctaggagccactagcgttctcaaatatgagaagcgagaaggtggattcaataaagtcttccttttaacaatggacaatggaccttgtgttgtggcaagggtacctaccggtattgctggcccgccaaggttaacgaccaactctgaagttgcaacgataacttattgtaaggctaagccgcatctcctttcattaagggtatggctgatatgcttacgaatttatgtctgtatagtacaatccaagatatcgcttccaataccgaaaattctcgactggaatgataatccttctaatccaactggaactgaatatattatctaggagtatgtgacaggtgttcaattatatcaacagtggcacaaaatgaacccggaacaacatatgctatgtaccaaagcactttcattaacaatgaaaaagatggcttccatagacttcccggcctatggaagtctatacttcgcagatgcgccgctagactcagactcaaagattccctttgagcagggcttctgtgtgggaccacattgcagtccggttttctggaaccgaaatccaggggaacatgaactctactgtggcccaagccccaattgcggaccttggagagatctcacaagttattatcgaggtttgatagataccggtttttctcgtttgcccaaagaagccgtcaatgatcgcaagcttctcccatatcaaggatcaattcaagatcacatccgtatattgaaaataagtcgagaggtaatacaaaagttgattgaagataaacgcattcaggacgctgctacaccagctctgcttcacccggattttcacaagaggaatatctacgtctctgccgaagaaccaaccgttattactggcctgatagattggcaatcaaccagcattaagcccgcttttatgtatgccaatgagatacctgatttcgctgcactcccaaggatccccgaggaagatccactcgaaaatgaacaaaatgaaacggaaatttttggacaaaaggaacgagaattaaaagatgcatctgtctgttatcagacatatgatgtggtcatgacagcccttgttcctaagcttcgtcctgcaagattacttgatccgactctttttcgactcttccactactgtcacacaacttggagagactccgctgtcgctgtccgccaagagttaattgagctttcagctcgctgggtggaacttgggctagagcgctcgtgtccatattcccccacagaagcggaattgaagcagcatgctcaagactatgaagattttgaggctgttcaagcactcaagtcatggctaagagacaaccttgatacaaattctgacgggtggatcccgaatgatgtatgggacactgcgagggttgctcatcgcacagcgtatgatgaatggatacagactgccaaagaagccgagtcgcgtggcgaagatatgacagtagcaaaggcggacaagatgtggccatttgatgctagatagaaaccaggggaaggcaatcaaaaagtcagctcactgtctctagtgcctagtctaaacccagtccagcccttacgttagtttttttacgttaggatatgacggcctgatgtttgtttctgtctggcgaggcattttttaagcaaatctcgccagttcctaggagtaagcagactgtccctgggacgagcatgagtattttccgcgggactgtccagtaagtctcttcgccagatcggaaacggcaaaactaactcgaaaagacaattcatagtccttaatttatttacattgtggtttggtgcaagagaaaacgagggagtggtctaagttcgattaggatggcatttcttacgtggcatccgccaaagaacgcctctgtttcttgagcgtcgtgctccagtacacctgtatggaccctttactcctcccggcgaatttctgtgcaaactgtctcgtgacctccgaccaagcaagattctgttccaagaattagtcttggcacatcatcaatacattgtgttccctccaaaaaggccttggtatcttacccggttgacaggccttacacctgcataacgtatacctttacattacccattgttctataactcgagacaaaggatgatacacagaagagtggactaatataaagatatactacctctatctccagtctatatgacctattcctatttcttcttctttttttctgtctagtcctctatactaatcgattgtaaagttaataattttagtcataaggcatccagtcaattgagctctactaaccagtcattccataactaatagattaataatagaccagccggctaatatatccgtaaggcagaggcatagttcagcgtagtagaccaaaggcaaaaataccttatatcgagtatattcggcgattctatatatagaaaaggggataggcgaggcaaagctacatacagagcgctcgagaggtcgaacgagggcaaaggactagtcatttcgtgccggtaaccgagggggcggtagggctcggcgagctagatcaatagcaaaaatgccttactggcaggacgcatataggatgcagatagcaggaaagggaccgtaacgggcgaaacgttcagcgagtaacagtcggggcgatgaaggcaactttatagaaacacgcacggcgatatcagtcatgtggaaggagctagacccaaagaggcacgctaaaccgaaattggtaattcgccgtcaccgcagagtacggcgtataccagcctggtgtgtggcggtatagaatgtataggaaggcggtatataggtggggctttagggactgttaaaaactcatgaacagtcactgtactcctacatctgcagatgtatcaaaaatacatggattaaactctaatgcgtcaggtcagtacggagtacttgtaccagaatctattgtcggggttcttatttcttaacaacaaccatgtctgcccatctccgcgagatctctgaaaattccgtggcttcccacgacacagagttgtctgaagatgctcgtctagcgagagccacagaagaaatgttagcagtcacagatgctgcaacacaagatcaagacatacttcgacggaccctgagcgtgcattctgtcatatcaagctctctaagcttcgcagagcgtatgcagcgggcgaaatggtttcagagtgctgcgctagttgtgatcgggcgaggaacatgcggcacggtctttgagattcccggaacaaaatctgcatacaaaaaaggcagcgataagcactcgttgtggaacgacgcaaatctgaccaacattgcctgccgtgcagtaacagagaccaagacttctcttcaggaaatattcccgaatgtctcgattcctcgtgtgcctgaggtgactgggtggatcagtcagaatgacttggagaactggtggctacagaatttgtcacgatttccagatgatactcaaactggatatattttccaagtccagcggatcctgccgcttcccaagccctcccgtgaagctctcattcgcctctattttccgaagaaattgcgccgttctgcataccaagacccggataataaggcatgtcttgttcgaccataccttgggcagcgaagaggagagtgggaattttctagtccagtactcagccttcagaactttcctctttatctcgatcagatagaggaactccagttagaagctactcaattctctgaagagatggctgttgggctggctattatccactggagggctttcttagacggtatggacatggaattcgtactcggtagtgcgacagcagatggagaacttcccaccgttgttgagaacttcaagacggtgaaaccctttgagacccctgctggtgatttcaaaagacggcaggtgcatctatggatgcttgacttcgataaagctgaccagcttaacctaaaggagagctggaagtcttgctgcgataagatggtcacagctgtgacagcgaatgacccctatttccccaacccagcagccacgggaactctcgaacacaagttgtgggatacatttgaacacgcttatcttcttgctgcgtctaatcttctgcatatacagagagggttgccaaagaaggcgaataaatacccagctttatttttgaaagcatgggagaagaaagctacagaactggcaaaggacacagagggtaattttgtcgaatttgggtaaaatcgggttttatgaatgacgccttttgctgcagcccacttcgggctgtctttattctgaaactggttgatctcggctgtttcgccacaatttcactgtgattagcgcgctttttcctgacaaccgagatgattggaacttcacttatattttacacagaatggtcggaagccgtcaagcctcctgttggggtagatacccctatggaccaattctacgcacgagagcacgttaacccggccagcattgactttctgtttgaaacagtacctattgatatccatatgacgaagctttgtatatattaatgctccttcttttattaatagatcaacggtctgctggttatctgagcgttcttggagtgcccggcgttggggaattgattcgaagcgtcgaatcgctccacctacttccaagcagtgaatagcatgattgtatcactgcttagcttatatgcatgtcggtttacacattttgtatctctacccgatatggtgaaaagtagtgacgacggagtgcgcacaaacgcaaagtagtctccgtacaacaacactgcgatggaatttattttcctttacagcacacctgtttatattctgcggcttatacttgcttccgaatattaactttaatcattcatgtcttctctattgggagcacgctgttagctgccagcaaccctaccacggcgcttgcccagtctatatccaaatcaaacgtctctaaccaaactgggacgcgtttcttgaaaaacccggcatggatgttaatctagctaggttttctaggccatctatgaaatctcttccaaatcgacaatagaagtatcctgatcccttgatccacgtcgcactggtactagctcgaccccccatgcaatccgtgcacaagcagttacaaacttcggtacaatacctcctagattgaccatctgctcaattccttgccgcccaccatttatttgagcatgttagtcaaagcagattactgtccgatatgtcaatctgacggggtggctacaatgtgttcgtggattcggtacgtcatctcgatgtcattttatgccaacttctgttctgttattttgccaaatataaaaggtcggggggtttgcaagtttccatttcgatgatttatgatagtctcggttcctaaccagcctatatcctgtcacaatgccttctaagaaagttctcattgtcctcagtgacgcgcactctttccctctgaaaaagacccgcggacacgatgctggcaaggttgtcgagcagccttcgggctttttcctccaagagctcacaaagccgttacacaaaatactcgacgcaggccatgaggtgacattcgcttcaccgaaaggtcatgaacccgccccagacccaaacagcgaaacgctcattgcaaatgccggcaacttctatgaacgtcaacgcgcaaacgatcttcttgaacgcatgaaacgcgagaatgggttcagtaggccgcgaccattcagtactatcagtaacagtgagttggccaccttcgcggctgtcttcatcccaggcggacacgcaccgcttgaagatctgggagaggatgcagaactgggacgaattctgcgttatttccatcaggagaacaagccaacggctgtgatttgtcatgggccttacgccttgttgagtacgaagaaggcgggagatgggtcatttgtttatgatgggtacaaaattacgtcgtggagcgatgtggaagagaatattatggagacattatggggtggggaggtcgagaaggttgaatcggcattgaggaatgaaggtgcagtcatggtggagggtgtacatgaaataaccggcggtaccacgttggatcgagagctggtgtctgcaggtaatcctttggcggccaatgcccttggtgatcggtttgtgcgaatgatcagtgtataatatcttgttttccatctggcttgggtttggctcattatcttggggctataatcaagttttatggctagcgtaagtgtaagcttggtacaattccttggaaacaaatccgggaggctacaatgatgtaacaattaaagcacacctgagctcatatactgctctagttcaccaaattcaactttcctttcattcatacttccaatatacctcgttttaagtattacttacctgtatccttatctttggaccttgagtatgaactacatccgccattcatttccatatgcagcaatgagacagcatatccgcccatctgtgggacttcgatcacctgggccggctttcagtcgaagatgtttcgccagcgaaaagccgagtggccaggcaaaaaacccccggtggttagtctccattttaacatatgctacattaattgcatctgacttacacttcatcgctctcaataggctactggtatcaattggtctcgggctaccaatatcaatctacctgtggcagagaggtgatacaaagaagcctagcagcaagcctcatacacaaccacgtggagcaaaccaagagtatagtcaggaatcagaggccacccaggctggagtacagaatatcaaatcgggatcttctggtggtgatgtggtttgttattccttctcttattgtgttgtcagggcctggttcgcgttatcatcatttaacgatccagggtattgggagaatgcatatctaactttcacatagcctcgaggcatgggtgcgcccaatggccccggaagcatatcagccaagcaggaaggcctctctaatgcggataccatgaacccatatgtgaacgaaccaggtaagagtaaaaagggcgagggtgagacagacagtgtgaaagcaaaagggaccattaggccgggtagacctcaggtgtagtctgcgctaaaacctatcgtcaccggtcttgaaatttaatatgcgcgctatatgtattgctttatgattttgttaggttacctcgcatcgcagagctatggaacaaaagtgggcgaagttgagccgttcttgaagatctctatcagtgatttccttttgccgttagactatcttcagggctccctacctatcaaatcatgagctagtagagcgaatgactctaagcggggcaccagtcaggcggggtacaaaagtcagcaatttttcgcccaacgcggtttacttcacttctcccactttccaaatattatcgctgaaacaacaaattacttcgatcaaggtaggctagggctgtgttttgtttgcatctctcgtggggaccttggtggttgctgactccccgtcagatctacttcatcaagtcatcaacaatgaacggacacgctgcctgccccaagtgcggtgtcgccgctgacggcactggaaagagctgtggcgcctgcggtgctgtatgttgattctgcactactgctgtgcgagcttatactaacccatattagacctgccctgtttaaagcatccctcgggtgtggatgaacagtatcggagttgagactgtttgtggcttagcgatggcataggaggagccagggcatgacttggatatcaatatgttcatagaaatgatatgatgacaacgataatgaactcaatatatccgaaaccaagtacgattgttatgtacgaaaacaatagaaacaacgtgaagacattcccctggaatgaaagaaatgtaagactgttcccagccgagaaacaaccatcaggatatagggtgcgtaataagaatacctccttgtctcgttcctcctaagccaacagccaggcctgggactccaaaatcaccatcactccagtagagggtcaccaacatcccacttcatcacggaccaactatacaccgcttagacaggtccagcggttttgcgccactgggaccaaacaccgatcaaactgctgacggtacctgcgataccgacgatgccatcgtcgaggttaacgataccaacggcagacaagggcgcagccagatcgcaaacatcggagatgagctgtatccgagcagcagagcgctccctaatcagattcttagcatgccatccatttttcattctgggaataagaaacccatacttctcaatcttcttagcctcaacaacaccctcgccctccttgcggtcaatagtcttctccttcgcctggagacggatgagagtgtagacaccagccacaacactgaaagccagcccagtgccccaagagcggtaggcggattgctgcacccgcttaacggaaggcagcttccgaatgccaaccacgtcgatgactgtgatggcgtcgagagtcaggtagctggcataaccgagctggcgaccgatggccaggtagcgcaggaccgggtcgacggggttcttgttatcgaaagcgacggcggcagccttgagatgctcgaggaatttgccgagacgcataatcttgcgagtcgtgccgaactgcttcttcacggcattgtaggggtcgatcgcggactgcggcttgtttgtccggtataggtaccacgcatagaagcgggagaagtattgaattgtgcggagaagcttgtcgcggccggctacatgttgcatggattattagcttgagtggtcgggtgaggacggggagagctcagctgagcttctcggccgaatgctcgccacatggggtttttgctgcagccgtaatgcaaagtgggcgtcttttctttcgtgcacagatagaggcaagggatgttgctttttggactctggggatgtatcacgtaccggttgtcgcgacgaagcgtagccagtgcgccagcgcagggtggtagatgagagtgttagcgaccattttgtctgttgccaatgagaatgaagacaatgcaacttcgaacacctgaggatgaagatgtcaagaatcaaatgtgatagttcacaagggaaaagggagtcggtaattgaccggcgtctggggccggaagaccgacctcggctgatctcgtgtgtgtgggggaagatccggaggtaggatgtaatgtatttactattaatacgacattcatggcattttagcccctacttatcatgcaattctttgaaataccttgaaattcttcggtatttttcacatgagcctgcgtcatcccattctcccgacattcatctttatcttttatgctgaagacgaccttcggaccttatatacaaatccaaactacttccaattgcatccgggcacaatcttagccctttcagaatatatccctttagcattgtaatcttaacgatagttgtagttgttgtcagcattactctatcgccaaagggagagtggaaggggctatttgctacatccctggtttgagagacgacaggcatccaagatcggagtaatattggaaggggaccgtgcagtaaagctagagtaagtccggggtaaaacgccagaacacaaagagcaatgtcccaagtaccttcacatgttgcaagtcttcgggaatacacgaggataccaggaagcaacagtatcaaaatggctgcgactgttttacagtttaggatccggaccacggtagcagaaaaagaaaacgaagactggtacatagtggagccgttttatttgtgggtaatatcgaagtccccaacttgaattagattgtttgtcaaacaagtcaggagttcggcttctgtcttgcgaaatgcatcactggcagatcagaaaggatattccctcgttgctctcatacattcatgggtcgtgtcgcaagggcaaggggtgggtgggatatttcaagtcgcaagggccgggtagtcgctgtctcgtcaatggtatctcgtttactggttgtgcgatgccgcgtatggatggagtgtgtgggattaagtagggctggttgaaacacaacagcccaaaagggtgagcaggtatgtgttgggcgcggtagggctcggattactgttgttcgcgggtgtcggtctggcggttatggttgcccatttccgtggtatcgtagccattagcctcgagatagtcgcggaacctggcatcctctaaagtaatggtgtcctgagaaaaggtgagcatataaacaaggtactctatctgcaacagttcatacctggttaatctgcggcatcatgaaaagggccataaaagcggccaagatacacagtgagctggaaacgaagaacgggtcctggcctgcgcgggtcgcattgggtgcgttcttttgtataactggaatcacgtaggtgcccacaaaagccccgaccttcccgatagcagcagcatatgaatagtactggccacggatagcagtcgcgctggtcttggcggcgcagagaccgatgttgtccccgggtcccatttcaccgagagcagagaagattctggtttcaaagtattagcattggcaatcgctaacgtctaacaactctgttagtaaacttacccgaatacgacaacaaaggctgccacgttttctggggttgcaagccacttgtagcatccggccatgatgaacccaatgataccctggagcccaaccccaagggcaagggtgtagcgaggaccaatccagtcactcacgaaggctccaagggcggaacctggaatgtagaaagaattgaccacggtagtccaaccgaagctcttccacaagggagccttgtcacctaagatgatctgtagccaggctgaagaatagataccaaagctgtaggaagagaagtcgtagaggaaccagataatagaaacaacggcctatacatccaatcagttagttggttgaagtctgcaaaggcaacacgtcggtgggggttgttaccaagcgcttccaatagaatctaaacccgttagtcaacgagtccaagcagtggaaaatgttgtactcacttaataatcagcaaggtcggaaacttgtgcatgcgctcccggttgaattcctcgggctcattcatcttcagccgaaggtacatcaaactcagaggggggattactcccagccccagtgccacacgccagcaagcatgcagatgcttctcggtgaagatcaggacgagaatcatagacaccaaagcagcaaccacgaaaccgaaatcaatctgaaagttggtgaacatgataaaccagcgattgcgatggccgctcttgagctctccggtgttctctgcggcgccgactgacccagcagggtattctccgccaatgccaattcccaggaagaaacggtaggccgtcaaagcagcaagcatgccacccaggctgccgccagctccataggagccagcaccgagagctgcaaagacaaagaggataatggtggagatcatcaaagaccacttgcgtgaccagtgatcactagtgtatccgaatatcagcatacccaccacagtgccggcaaaaacaatggaagagacattctgttgggccgtcgatttggtgtattcatccccgtaaatctgttgcagcatagtaccgacgggaccaatgacctagatccaagtgtgtcagtaaagagcgagtagcattgaagctgtggggctgcatccacgaggacgaaacataacatacctggttcaagtaaccgtcagagaagagaccagcaccacaggcaatagtgggccaactccgttcccagcgccctttcttcgtctcgtcaagaggcggcagctcgacaagctgctcctcgaggggaccactgcccttctcaggcatctccttggagtaggactgatcctcggccattgcaagggtgaggaatagcaatgagcactttggctgtgtttacgcggcgagcttgagcttccctggaggcaaggatagcaaatttggcacgcgcccaacgatatttactgtcacgcgatcacaataacaagagccgcgtcgatcgaggggttcttattctctcaaccgaggaagaagagattagaagcagagagaaaagagagcgacacctacctagagggtaaaaaagattgtcaatccaaaagaatattaaaaatatattaataaaaacaagaaacgggaatagcatcactctaactcgcatggggacaagtaccgggtacctatcacagagtagcagcgcgcgcgttaagccaagtatcggagacctagtgggacccggtccccgagcttgatcattctaagcatttagctttgagaatttcagaagtaatatatttgtaggccaatgatagacaccataaatatcaaggtccattccctagccaatcgtgtgtccgtctagagtgaccggtcggggtaggttgcatccaacaacatagtcggccactccgcacgttctactcaccataaggcgatgagttgatatcggtatcaaagtgaacacgcggcttcctgttcgaatcagatatgcaaaccagttagttatctcaagggtgtggatgttgatagaagagtgcattttctacggcgcacgtccgttgatagttccccgtggaattgtggctacctatttgtgtggagtagtctcacatgaaaaagtttttgaggctgggatccaatttcctaaaacagcgagagatacatgctctaacctttgtttgctcaagctcaccaagcaggcaatggagcttcgaagggtttccatgatttccatgatttctaggcataaaacggttcagccctatgttgtatatcaccaccccatatcataaatcctcgggcttgagtcttgaacgtaatacaaacacatagttaaaccatgcagttgtaattataattgccttcttctagcccaagctaagacatggaattcctagaatctccagtctgaatcttcagccgatgcgagtactataacgctgagacaagtcagatatattacaaacatatatctctctcaaaagtgaggtataagagtagaaatatttctttggcataaagggacaaatataatttgaagcctatagatgcgaccggggtctagcacaagtccaacgtagattatcttagacgttcgaagggagaacgctaaagaaggctcggcacggagaaacattccgccagctgagctcgggctacggtgatgcaccttggcttgatctcatccccagacatcaccagctgccatctttcccctgctctattgcatcgttttttaacacttgtgggaatcctgtcagcatctccagtttcccatcgtcaccatggggtctgatccacagtacatcaagttccccaacctctccatcgcccaacatgtcttcaatctctccaacccagcatgcgcgccagctgtccagcagagctcattgaagaagctccaagaggttatcttggagaacaaaatggcccccttctaccggcatctagcccatcccactgaaggcatcttaaacaactccggcgaaggcgtaacacagcacccacacaatgggggaagctcagcgaagcctctcatcacgtccaatcttcttgcgtctcgcaaaacaccgctaaagttcgatttcccttgggacgagaatctctaccagtctctactagaggataacaagaaagaactggagaccttccagaaggaggaagacgatgcggaagaggctgctggggagactgaggtacaagctgcgcgcgggaagcgagctgagttctgggctcgcgtgggagataaggtgagaattcttcgtccatgttttgctaagcttcttggttttgttggctgacactagtattttcgataggacaaagctgtcgaatcccacgaagcgctcctcgaaaagaccggattcctgggcaccaagattgatctggtaatggctatgctccgcatcggactcttcttcggcgaccttctgtttgtgaacaagaccattgaacgagcagagaccttggtggagagtggtggagactgggaccgtagaaaccgtctcaaggcatacaaagggttgcatttgctcaccattcgctcttacagccttgccgctcccctccttctcgacagtctgtctaccttcacaagctacgaactttgcagctattcttcgctagtgatttactcagtgctcgcgggatccttgtccctcaagcgtgtggatttcaaggcgaaggtagtagatgcaccagagatcaaggccattcttggctctggggaggaccagctggctgctttgagtggggaaatctcctcaggcccaggtgcccgggatgaggagatgaaggatgcaactgcgtcactacccacacccgccggtgccaagaccgctgtcaacatctcatctttctcaacgggatccggtgtgccagtagaggctgaggtacctgttgatttcgcaccgctcgcaaacctggttaccagtctctacaacggcaactaccgctcgttctttgtggcactcgcggccgttgaggatcagttcctgacacaagaccggtatctacacgagcaccgggcctggtttgttcgtgagatgcgactgcgcgcctaccagcagcttctccagagctaccgtgtcgtggcgttgagtggtatggccaacgacttcggtgtgacggtagactacttggaccggtatgcgctgcctaaatttcttcaaatatcaagtcatttgctgaccataactacagggaccttgccaaatttatttcaaacaaccgcattgcatgcaccatcgatcgtgtcaatggtatcattgagacgaatcgaccagatgacaagaacaagcaatatgctgatgtggtgaagcacggtgactccttgattaccaaaatccagaagtacggccaggctgtgcgtcttcggggaagtgagcgaagctaaagtggtacatttacaaacttggaggcattcgaagcctcacaaccacaacctatgatcaactatgtatgcccgaatagacaatcttacttgccgcatgttctcaaccccaggccccgtagactatgacatgccacccatggcatgacatccatagacgatcagtcccttgactagaagtccacggttagatccttttagatccttcaaaggttaaacccccgcactgggcacggaaaatgggtcgacatcgggcaaccatctgacctgactttccctcggagaattatcgtcgatcgatcgtgttaccatgcatgaacgtacgcggtagttctcatcatcgaccaaataaccgccgtagccacgtcttccgtgcccaggtggtctccttgactctaaatagttcaacgtccttatcgtgatccgccggatgtggagaaatgctgactcacaggttcaccgccaaatggccaaggccattttttcctcccttcttctcccgatcgcaatcggacaatcacgacaggggttcgtgctaaagggacttttttaattgaccaatctaatccttgattgacgattcgtcgaaatgtcctggcaatataagctcgcatccagcgtgcgggcctttccgctacgggcacagactagccggccgcataatggcctcctatatcgcccggccgcacgtgccgctgtggggggtgtctctgccagttcaggtacgttggatcccgagatggagtttccggcaatccttcggtattgacccgttgttctgcggtataattactcgttttgaccgtatccgattctgtctccgcggcctttatatacttggatctcctcttagtttcggggatactagtctacttattctgaatctcactaacctccgggtcgaacagagtccatcatgactcagacagcctcatatagcgcgcagcgcaacctgtccaccccgacccctaagtgcctgaacgtcgataacatcaaccagaacgttagggatgctaagtacgccgtgcgcggtgaattggccgtcaaggctgagacctaccgtcagcgtctgattgatggcgacaagtccctgccatttgacagcgtcatcttcgccaacatcggaaaccctcagcagctcgatcaggtgcccatcaccttcttccgccaggtcctcagtctcgtcgagaacccattgttgttggagaacgccgaggtcctcaagaagtcatttggatataagcaggatgtgatcgaccgagcccaggttcttttggccaatgtgcagagcgttggcgcctacagccacagccagggtgccgcggggatccgggatagcgtcgccaagttcattgagaaacgtgatggtttccctgcaaacccccaggacctgtttttgacttcgggcgcctcgtccggtgtgaacaccatcttaaacgtcatctgcaacactcctagtaccggtatcctggtccccatccctcaataccctctttacaccgcaaccttgacgctgttgaatgcccgctgcgttccttacctcctcgacgaggagaaggcatggggtactgacgtcaacacgatcctcaagtccattgaggacgccaaggccgccaagaccgatgtgcgtgccgttgtcgtgatcaacccgggcaacccaactggtgcctctctgagcgctgaggacatcaagaatgtccttgatgtcgctgccgaggagagcttggtggtcatcgctgatgaggtgtaccaaaccaacgttttcaagggtgagtttatctccttcaagaagcgactgcgcgagctccagcaggagcagcccggcaaatacgacaacatcgagctggtctcgttgcacagtatctccaagggtatggtgggtgagtgtggccaccgcggtggctacttcgagcttgctggcttcgaccccttggtccaggagcagatctacaagctggtcagcattggcctgtgcccaccggtcaccgcacagtgccttctcgaatgcatggtcaaccctcccatcgagggtgatccaagcttcgagctctaccagcaggagtacaccgatatctcagaaggtctgcgcaagcgtgccttttccttgtacaacgccttccagcgcatggagggcgtccacctccaggagcctcaggtacgtattctagagttattcaattttttacgcatttcctaatcgtctcgacagggtgccatgtacctcttcccatctattcacctgcccgcaaaggccatcgaagccgccaaagccgagggccgtcccgctgatgagttctactgcttggccctgcttgacgccacgggtgtttgcgtcgtccctggctcgggcttcggccagaaggagaacactttccacttccgcacgaccttccttgcccctggcaccgactgggttgagcgcatcgtcaagttccacgccgagttcatggacaagtaccgatgaacatgtactaatgtacaaaaagccatgtaaatttgaaatgcccatccatcgagatcttcgagcgattggctggcaccatatattactctttgttcgtggttcttttcacgtctatacgaaatgggtttttggcatccatacatgtgtggcctctacgacgcaatgttttgaatatttgaatttggatatggatctggaatcggctcgcccccgatacctcatagactactgactccattgggcttgctattttccatactcgtttttgggtactctttctggcgtctgtgcatcgcattttgaatagtggtatacatttcccttgggggacatttgcatcgttcgctctatttgatatgggtactgcatatcgtgggttacgttttacagaaacgtattctgaaaattgattcattgattcataacaagttcttgtatctttcctggtcctgatttctagttggctaagagataactagacgaatgagagaagagtattagaaaaaagaattgtggcaggaagtgtcgaattccattttgttgataatgcaattatcaggttcagcaaatattaccgttcactctccgagtccaaaagagcaaagcaaagcatggtggtcgctccagagtgttacttcgggctgagtctgctgggactcgaggatatccgtgtcactttgagtgtgctcttgtccatccaactcgcccacttgttgagcctcgagtatctcaattttacgtgctttgagaccgagcagcgcgactttgtccatccgatttggcggaaatcgctgcttcccatccgctccccatgtgtaacctggttccccaggacgaagagctgtccaggcatctgtaagaccattggtctccacgaggacggcatcttcatccagaaccgggttgaagtcaccagcaaccagcccacggcctgcactacgcaaaaaagaggaaacaatagcgagttgccggggccggtgggaaggtttgatagccagagaatccagatggacgtttgcaaatcgtacccgggtagtagaagaagcgtctgtaggtgaagggacgaacagatcacaaaatagtgcatctcttccaaagtggctagggaacgccaccctccaaacaggccctagagcaaacctgctcgtctccgagccgtgtcgcgatccaaagcgcgtcttggataccaaggtcattgtcgtgaacgagtttctgcatggggtgttctcgtgcgcgcttgagaaccacgatccgcgaatgcgctcatcgctcaaaatcagtcgcaagccccgctgcgaaacttcttggagaaatatgatgtccactttggattccaggtgagtaatgaatgtgagaatttctgtgacgcgttcttgtgtcccatcggataatgcgtcaatattccaggtcaagagcaccatatcggatgatgtatcctcggcgcgctgtgactctgcatcttcatttgcatccactggatcccactgctgggagttgggatcgaactggtgccaggactggaattttggatctggcacgtcggctgggaggggtgtgtcatttttccaggacattatgcttgacctaacacgtacgtaaatatccatggtgagaatgaggctgactgtctaggtactcccgagggtgccttgaggttcaccttggaaggtgtggtcagtcttatgattagttaatggcgtctaactacgttgtgcctgaaaaggggaaaacaactagtgtatattcgactaagatgtgatggacaagagggagagagagaggaagagggagcggaactatctgatgatctgaacccacatgggtgaccgccttccggtcacccaacattagttaagcattaagcctcaggctgaccaggagtgacgtgtgtctacatggatgttgtaatataaccacatgtatgtatagattaatgatgattttcatgatgttggaatccctaatggcacagtggtctaacctaattaggacagatcaatcttaagtcggcccatgcgcggaggtctcctcgggatgtgatgtattgacgtcgaacatgcggatccgggccaggtggacggcaactggaatacgtcagtcgatattggttactccgcacgcgttccctgactctagtattgacagcaagagcattcttggggtatccgaaatacacgtgacataggactaacacatgctccctccgaactcccatcgttgtttaaacagtccatccattagctggccgttgcaggggtcgtaacacgcgggctatactagaagatacatgaactctcaaacatatacatctttcaggccaagaatatctgaagcttatttctttttgaacggcctaacgtatggttccataatttcgtgagtagctagtgaagtgatgtagcgggttgtacaaggggtatttctagtctacatgtctctctgaatgaggtcataaggaaacgcactacagtcggtcttatctaatgctctgttatgcctggccatctggattgcgccctgtacatgtatcttagtcgaagggccatcaccaaccaggatctatgatttgttagcggtatgttaggtaaaccaagagatgcagtcataattacctcgtcatgtgctaggaataggggtaacgcaagggtcgaatcactaatcggagagtgtatctctgaagatgatatagcctcccttagtgaccgcacacacgcgattttgtactgaagggcaagttgaacaaagtatggcccattatgtggtagatattgtgatagatggcgacatgacacaagaaagagaccattcaaagagctagcattggtagcagcaagttgcacgaagtgtttgtttaggtgctgtgtacagctttccggatggctaatctggctacgttgcgaagttgaacacggtacaacatttgccatgtctgcgctaggttagtcatcataatctgcttcttagaaggtccgtgagaagtagcggacttgcgagatacatcgacttcttctgacgtgataaagccctacttacagtagtctaagagaaaatcttcattcgaatttaggctcctggcaaaacttgcgaagggatctctccggtgagaccccaggaagcccagagggcttgtgatgacggatatcgctatctcggcggccgctgtggagaatggcaggctttcgtcttccgagccactgatagttttgattgcatggtactcaatgactctctgtcgcctcgtcttggcatgtgccgatcgggctgcatgtgagtgaactcgtcgtcgcatttcagccgacgctacctcaggtactccgggtttggatgaatggatgaactggatttcacttcttgtgcgggacattgtggtcgtggttcagcgtctgaacgagagccactatgaattccaccatgagttgatgagatgcaaaagcgtgtaaaccttaaagccatgaccggacgttgcaggacgaacctcggagctgaaccaacgtggaggtatgcgtcatttgtcagcaatgaaggaccttgccaagacttgctccttcccgataaggaatagtgccacgtgcccactctactagcgtgccttattcctacatcgatcatcgctcatagcacaaacaatctcattgatagattgaccttttccttgttagtaaatcacctaccagaacttcttacacttgcctataagtagatatgcaagctttgtaagcactgaatgaccttgccaagacttgctctttccagataaggcatcccccactacttgccgttgcttcgaagccaggaaatgtccgtagcaacagccaaggagaaaaattgcattcgttctaatctcaaacaacttctacggaagcaagcgggtaatgaatagcttagcaatcaatcattcaaggtacttatataaagaagtgaccagccgcatagaggggtgaccatcttcaagagagtctccctattcactgctccgctgcatatccagtattcattatggtctctcctcctatgaaaagttttgtgtcattcaccaagacttggcacaatgatacttacccggccatctcacccacacgcccggagctttcgatggctgggaaaaacgttgtaatcacgggtggaggcacaggaattggaaaggcggccgccatcgccttcgcccaggccggtgccaaatcagtttccattatcgggcgcaggatcgaccgtctctacactgcagggcaggcgatcactgaagctaacccctcgactcaggtcgtcatgcagacaggcgacatcaccgacctcgcttctgtcaatgcagctttgggtgcgattgtgaaaaaggtcggcagcaacattgacatattcgtcagtaacgctggtatgcttccgaaagagggcccggtaattggctacccagaggctgaactccggcgcactttcgagatcaacaccatgggcactttccacgccttgaatgcgtttaccccattggccgcccctggcgcaaagttcttgtacacggcatcttctatcagtcactgggctcctctcccggaagtgccaggagtatggagctacgcggccacgaagggagcggcgctgaagatggtcgactactatgcttccgagcacccggacattcacgtcgcgagcttccatccaggcatcgttggcactgagatcaacccgaacatccccgtagggccagacacgggtgagtacctttgttttccaagccatcaggaagacagatggactgcagagtcatgctaacacaccttgcagtggagttgcctggacactttgttgtgtggcttgcgtcggatgaagctgcatttttgaggaacaagttgacctgggcaaactgggatgtggatgaactcataggtcgggcggaggagatccggacatcattcctgctaagggtctctctgaatggtgtgaacatgtagttgaagttctgttgtctgacgagttcgagagatgtgcaaccaagttcatagccacaaattttgataaaggaggcgatgttgattggttctcatcgacagaaatctgattctagtcctcggagttcaaaaaccaattcttcatgtgtatgggacaaggctttcaataaagctgacaggaacaatcgttagttaaagttaaggtaagggccggcaacaagactggaggatgactaaacagtgctgggcgggtgcagaataagtagtagtggtgttacaggttaagggctgctagacgactagcttatgctcatagtagtaactacaacaattacgatgagctccgatggtaggcaagatatatatacacggacccactacaaccctaaaaggagaataccagacaacgaggtaacagactaagactcatgacagaagtaattgatgacgacctgatgtgcaactaacaataaggcaaacttgtttactttattaaagaatatgcacggtcaggtgttctattgcttggtaaatgcttagcaactaagaccgagcttgaatggtctagtgataaactagtactagtcagctgcatctgatctcaacaaagggattgtcattgaacgcaatagtatacagattatacctcaatctgacatgtaactatgttgtactgtgacacaatacaaagaagcggtaagcattcgaagacaaaaaaacatactccgtacataccgggtaatgtctagcaactcctagctttccctttccgtttcaatgctcaccccttgccgctttttgatcactaagtagaattgagcacgcccctgagcagcctgacttgttcagtgagtattacataatcatataactattccacgaactgctgagaggttaagtaatacccacctcaataaaatgcaacagtataatggggctagtagttgaaacactcctaggagcacagagcctgaattggaaattgattgaccgaatataagtatcctttggcgtggttactgccttggcagaagccagatagccacgatggtcacatcgatgatgtccgtcctttgttgatggagcaaactgtgcatggcagccaaaccatcgtcccactttctgaggctgtctaacagtcggttacaaagccactctggggctatattgaagatgacgaccagaaatgggaacgtctggaaccagacaaatatcatttgaatggctcggatagcctcttggtatctggcaaaaaaagtccggtttgtcgagctgattccaacatctactgtagctataatccgtgataatatcaacagtcagggcgcgaaaggactccccctggtggctgtacaaggaatactggatcatgctgcacatcttatcggccttagcccagatgactttcttaaggctggggatagaccagcgtgagaagaaggggcttagagcggctcgacgggtcttatgaatatcgttatcaatgacattaaggaggataggagtcttgagagccgtgtcaatgggactatagtaaccaggctcctaaagaagcttgctaccaacgctgtaaatcctcccgtagttctctggaaagctaaagtggacctcattgggagggattggataacataagagcataagagcatggatgagatttccttccttacagtattggtgatagggaattgggagactggagagaccccagaggaatggaccggggatcttggctagtggatggaagtactggcaactgagacatggtcagcagacaaagcggccatagagctagtagcctgatactagagcccatagctcctgtaaacgattattgtggtggaatattacaggcccaggcagttgcaggtgggaactttcactctctatcgcttccaaagtctaggccagccatgcattaaaaggctaaatggcttgggctgggctcgcgacttgtccactcgcacttaaatgctgttaacgccgacattgcctgtaataatgccgggcgttgtgtctagaagaccgaagcagtggagagataccggtcatgggagcggattaattcatcgccgaaatgtctccgcggaccaagacccactctagtacccactccacggggcaagacccgctccgcggacgagccaccgatgatcttccgtgccctacctcgacgctttaaatagcagttggtgtgctgggttcattaaaagcacttcgctacaatatactatacacatatttgcccaatccgttgtatccttcaataatgcactcccgagacgcaaaattttcggaaaaagacattccagatttgagtggatatgtcgtgattgttactggaggtgagttctctctatattgtgttgtctgggaggccacacggtgaatactcactgaccttcattcagggaattctgggatcgggtatgaaactgcgcagcagcttgctatcaagaatgcgcgcgtttacattgcgggccgctcccaagagcgagttcaagaggctatccggcagatgtcgcagtcaaatgtaacgaagcagctagatctccgttttcttcagctggacctgcaagacttgaaatctgtcagggcagccgcactacgtttcatgacagaagagtcgcgcctagacattctgatcaacaacgctggcgtaggtggtctcctttcaagaaagccacggaatgtcagttctgacactaactatcaatgccccatcaggtcatgacggttccatacaaacttactgttgatggattcgagacacagtggcaggttaactatctggcgcctcatgtccttacatcaaccctgatgccgcttctcttgaaaactgcatcttcttccggctcttccgaccgtgtgcgcgttgtcaatgtctcgagtgatgcagcatttttcggtccgaagacgttgttgctggacgacgtaaacatgaccgagacgaagggagtgatggaactgtggtatgtgcacacctggatgaatgaacccatgctctgttactaaatcctagaaggcaacggtatgggcactctaagcaagcgagtatccgggatgcgaaagagttgaacgatcgttacggttctcagggtaggttaccatcgacttgaggaacaactcccatgctgaacaatatacaggggttaccgcatactcgcttcatccgggtattgtccgatcgaatcttcaacggcatgatccgaccgtcattggcagcgtcgtgcgaactcttatgaaatttgcagctggtagcaccccgctagaaggggcgttgaattctcttttctgcgccaccagtccgaaggcgccgattatgggacaaggtcagtatttcgttccggtgggtaaattggactcccgagcagcaaattggatcaatgattcgaagaccaacaaaaagctttggcaacaaagtgaggatctgatcaagcgcttggtgtgacagtgggccactagtgcttaggtactcatctgagtttcatttgtcacgggggcatactaggatatagtatttttagtcattaattcaagttgcattactggtacgaacatgctaggttacggcccgtagtttctgccagcatcatcagctcaattccgcctatgaatcaggaaaggtgataaagttgggcgcacaccgcaacttcacttacattgaatcttacggcatggctggccaaatgtctccttgttcgtcaatgactagtgattcactcctcataggttgttccaggattcacgaaagttgagaatctgacgcggtacgagagcgttgaagaaacgtctcccagaggccctaataaatgcggagggtggtaagtgcaactggagcttgtagagcaaaatgggactcttagcaaaggagaatatcaagacgtacccaatcgacattattaggagtagcgagcattgcttctatcccttccagatatgagttttgcggcgagatttctactagaaggagggctgtgagacgtcatgttttgtgacaaagaaatccgactacggattgccgatatagaagactcaacgggatgaaatgggaagaacataccttcctgcaagaacgaaggatcgtacgagaagataggattttgaaggtccccaagcgattgaaagtcctcaagggaactttcctgagattcttgggatgtgcaaactctctgtagcatagctgaaataagatccaggccgaattgggcttcagtggaactcgctttgaattctgcccaaaattgacgggagtttttgagggcttcaatcagctcctccgagcgataattcccaagattacggtcgtatgaactggaaggcgcatagccttcggaaccacgggagccaagttcaagacagacgatcatggatgcaagtaagaagtcatgctgctcaagagaagagataaaccatttgtctcgataaagaagaccaccagggtggacttctttgaaaatgttcatctggtgtgaaaggatggacattgccgcgtcgatgcaagaggatcgcgaataactgaatttggggtcttggtaagcctttgtcatatggtgacgatgcaaaaagcaccgggctttctggaaaagcagttcaatattgtaacgccgaattagtaaatgagaaggcgttgtgacggatgcttcggacgaagtcatgcgaaaacggggtgggatggagctctgcacggcgagcaagcgtttatcaagagccatgatctcctcatatccctcgacccgaccgaggcaaacctcgttgaaaatagttcggaatacggacagaagttgagcttttgcaatcgtgtaagatacaggcgttagctcggtatggggccgcgagggtggcagtcgcatcgtgtctgcatcaaaatcttcgtcgatgaggttgtgtggaagctgagtatcacactgtgattcttgtatcatggaaggcaatccaagctgacatgaagtcaaggcatcaagttgtaaaattatcgcccagacacgacgtcgcatctcaccattgaaggtagaaatctgtgagtagtgctctgggtctcgatgatatcccatccgcatcgccagcctggtagcaatgccacaaagaacccatacgcccaagtgagcatctcgacgtcgaacatactcgttttggatgttgagcagcagcgcttccatagtgtgggctgtaggaatagtagaatatttggatatgatgagacattccgtggaacaccgttgaaaaacatccatggcattgcgcggactgcctaacccgttcggaaggtcatcttgtgatcgtacgtagaagaatacccccatggacatgataccgaaaagaagactcagccacggggcggagaagttgtggggttcaagccagaaacgggcatactgcagatagagttactttcacaggctgacgatactcataccaaaatgaaggtacctcttgtccaaaagtgggcttatgaatgatcactgcattcgcagttcgttagtaacttcaagtttagtggggaagaaattcgtaccagcagacggctcattcgaattgatgtaacgagataccagtctgtcagccacatccctcggggggatttcacatagtactgccgctagatccgagctagggtgtgtcccctcgaggagcattggccccccctcatgttggatttgacctggaaaatccaaaggttctgccgagtggtctcgatcgatatgctctctaatgcttgcaacctagatattgttactacgatgagctcctattgtaaagcctcctaggactttgacttagttctttacttcgttgcaaatcgctgcccagtgaatgccggagacatacaccacctgaccgctgtttgatatcatgtggccgggcttgacctcgatatcattcgactgtgcttggtcagatgcaacttgctcacggctttcaacggcgaaccccaattcctgaatattcgatggatcaacagcatcttgaatcggcgaccctggagcaacgcttgtaccgacaagatgctctaattggcgaatacgcgcagagagatgctggtttccatgtcttgtgtgagcagagttccggcttcgtaatacagtggcataaacgcagtcaacacctctcgtggcacaattaccgcacggctccttccgatcacatttcagtctaaccagaaattggtgagttgacttcattgacgataggccccgcacttacttccgttgccggcaagaagcgcaagagaggaatccacgagcaccttgcatagtttatagatcgagatatttaaccggactgaatcgcagggccactggagccgttgaggttccaaaggaatggagactcgcgtgggataggtcgcgtgagtgtcgtatctcgactaggtctctctaaaaacccacccacccacgcaaacggcccgttgggtcggtcttagtcagcagacccgtttgctggttgataagcgatgagtcggagttcatgtttctgaaccaggcaatcaagtagctaaatgtaggaatagcctcaggagttcattgtgtgttactgtattagatacaagtagactggtcgacagatatgtatgcacgtgatcctaggatatttaacacgtgttgtagttcagaggtatgattgtcattttgggggggaacatgcaatatatataacaatgagccaagttgatcaatcatcttgctcgtccgtatggacacctcgggaattgtttccgatgatgcggcttttaccactacaagacaataatattcagcattaaaaaccataagagccctacattgagtaaattccaagctcttggtggccgagtctgatctcagtagccgttatgtattatatagagtgagaaatactttgatccggctactatacggtctatacctacttatcgctgcggtgggcccggatcaattgaggactcaaggcccccaggccaatccttcggagttccgcgggacaacccagaaaagcagtgcagtcgtcaggcagtaggtacggagtactccgcggatgaacccaactgtacggagtactaccgactacgtcaggacgaatggatcggcctacttatcattatcgtccatggcatttgtttatatatctggactgatgtccgtagggtcaccatacgtacacatttcagctttgccaagcgaatattcactcgagctcgatgtctgaactaagcaccgcgccaactccatacttatcctcgtaacagaaaatagattatatctgagatcttgagctcgagacgctctgaattagaaaaaaagatgaaagcaatatcatgaaccggatggggttctccactccgtcctacgccttttcgtcatgacgtatctccttaataagatgtagtggtccaaacattgagggcagcagcgatactatcaacgaactaactatgtatcatagtataaacgaccttatgggggctaatcccttctgggtatagtctgcagtgggctgagcatcagtcattctacacgtgactgaactgagcatgatcactgatctgagtccgtgctgacatctactcagtgagcctgagcctgagtactcataaaagcggccgcagatcaaataggaaagccctacctggcagggaaaatccggtacgtatagtaacatacacacataccccggctgctccagtagaacctatgacctcagaagtaatccagctctatctctccagatccacaatgccttccctgttgtacatcctcaacccaaggcccacacatatgcaaggcgcataagcaaatccactcacatacacctcacgctatgttgtatgtacatattcggtaaccggctatctgtattaccgggtccaaccgattctactcgcacagcagaggtgcagcatacagtagtcacactgcagaccgcatcctcggacgaatgtcacacttaccttgccccaagccctgacttgcgtcgtcttggctaatgcttagccatggggtagcgccgatagggggtttcccggttccatgttgcacggtatgtacaaagtatattatgcaagtatgtccgtggttgcgttggatagatatatagctaggcggggagtgtacatacaaagcgtggaactgttcgtttctatttagggtagagtagtgtgatgtagtatatatgtatattgtagagaaataatttattgcttattagtgttaaatagttgtgcgatatacatagatgttgttcgactgttttagaatggcggggagagtctcggagtaagggatcgcgttacaactggatcattgggtacttagggcaagagggcaacctctagggcctaaaatactccgtatactccgtatactccgtacgacctgaccaatccacgagtcaatttgccgatgaggcagctgagtgtcactgggcgtagctcaggttttctcaccgctacatccccgctgcctggccgggatcctctttccatcgatcgttactactagtattttttgaagctgaattcacaaagtagtttatttggtattaaactatttacctagttgataggtaattggtgattagtgatatcatcggcttggggaggtatctcagctaccgtcctgtgttgccctatataataaaatatcgggtgcatacatccacaggcgaatcccagggtttgtgatccgcactgtgcatgcattgggtatcgttgtccgggggcgagtgcataaagaagaatcactcgagtcattatacatgtaagaagagaacaaatgagaaagaaattctatacaccagcgaaaagcaagcaaggagcaaaaaaaaagcgcatgtacggaagcaaaagccaaagaatgtacaagcacgtgcatgtctccaaatcgcaaacccctctagattggatggctatcaaggaaggaatctagactggctaatggaacaagacaaatcaggcatttatcatcatctctcatcatagtcatgaagacggtgtggaggtggtggtatattgccgcgagagagcaagccccgggacagaagaaccatagggggaatataatataagcaaggatcatcatcaaccactgtttcttactagacccaggattgttggaagaagttgtcgtccatgggcggggtggaactagcatcaaaaagaccgctagaccagataggaacggagtccggcggcggcggcgagggagcgctggtaatcggggccgacgtcatgggcttgtacgctggtatctgcgacatggtgtagatatcctgcgcagagacaggttttgactccacgctcatgctgacttgcagctggtgctccagcgcagcagtggactcattagtcgacttaagaaagtcatcgatgttgatcgagtccagctcgttggatgccaggagatgcgtctgaggtagaccaatcaacgaggatgcagagctgatgcggagatggtccatgtcagacgtttcgctcacgctgtgcagatcgtgcatgtcattgctagcatgacccaagcctggaagcgtcccaaactcgtcagtttccgaattgtctccggatgatgatggcggtggaagacccgaggagtacgcggtgtaatcgaagctggcatatgaaggagcttgcgtactggtggtgccaggcacgtcggagtatagagggaaacttgaccagtcgaccgagggagcaccgatgccagcagaccctaggggcatatcggaatctggcgaagtgaaggaacattctgggtaagattcttggaatgccatgcaggtgatcggagaattgctgctcgtggtcgggaaggaggcgaaagaggagacgtcaagtggaggaacactggtgacaatctgctccaggggaaatttgtccatggttgcaggggcagatatcgggttcgacagcgcatcatgggatcggtctaatgatggagcgggaggtgctggtgtaacgaagttgtcgaggtacgagtgatcgagaggggcaggtttcaaatcgtcttcggcgcccgaaagatgcgcgctgttgggagaaccatttcgcgacgtgtgttgtgaggtaggaaattcggatagggtgaaaggatccttaataaaggtcgactggcctagcggcaaatgatccaccgagcgacggggtaagtcggttgggtggtggacggaatgcgatcgcgggatcgtataaggcaatccacatttgtgagccatgtcattatgcttgtgggcaggtttatgatgaccgtcgcggaaaatcgtgagcgtcgattcagatttggtagacgtaagaggcggtttccgtggggtttcaattgtaagcgggggtggagggaaggcaagactggtttcaggcacagtatctaggtgttcttttttgagtgcacaaatgcagcgctggccatgacagcagccacagcgaccatgggaaatgccagtatggcagtcttccttcttcttcttttcgccgcaatcacactgggtgtgggttgtccgagacttgcgtaggccgcggcagtgagtacattgagagactgggcggccttttttgttgatgtgggtcaattggcggtctaaaggggggattagcatatatacacaaggttgagatagcgtcagattggcataccactatggtgacagctgctgactcggtgaccccggacgcaagcctcacaagcatacttttcaccatcgatgagcatcgctgcggtgttactgggaggtacacatgcgatgattcgcgagggataccggagaaaataaaagtttggaaataaaagagatcggttgaagagaccgaggtatcaagccgtcaaggcgattggcagcggctccttcgagagggccgggccgagtagaacaaaatgaacaaaagggtataatcgtatagtcgaaggtcccaatgcgcggtgttcacagaacgccggactagcagtgtagaatgccgctgagagccaccgcactgtcttcgattggaacagaaaacaaaaagaaatcgaaaatccaaagggtatctcaggcgcgaggtagagagagggagggggggtggtcagggatcggagagtaagagagagggagagagagggggggaccaagcctacgcaccgtttggcgccggccgttagacaggacaccaagtaccggtagtggcggccaagatgaaaagcgttcgataaaagaagacgttggacacgcaatgaggaagagaaaagaggaagggaagggaggcgggcagcagccgttaataacgggatggtatggaacgaggattttcgctgcgctactggtctttgtggggggccatactgacatgtatagagacgactggtattgtacttttacttggtttttactgcttttactgcttttcctgcgtttatttactggttttgaatgtaatggttgtacatgctgatatagaatgggctaacaggtggtaaattaactgtactattactccatatcacacaacagatgcttcttcggttctttgacctgaatccttctggactccacttacaggaaccatcgctgctaagaggttccaacgcacatcgtgagaatgaatttagtttttcttcttttaatctactagtcttgtttcctgttcctcgttctctattctcgctttttaaactttgcctttttttcacgcccaaactggcagccccaaccgggtgtatagtatgaccgaactcgtagccactacatggaatttcccttacaacatacacaaaaattggcgtctaatcttgacgaactcaccccacttagcaaaatatggacctaaatctggggccgcatacggagtatcccgactcatactctctcatacttacatatgaacattgtgtttgtgctacggtaaccctagttgctggggctgaatctattataggacataatgtttcaggggtgcgcttgagccaggtacatgaggaactttccataatccctgcaagtttccctagtttatcttttcatccatgtccttggcacacacaactagtaatggaaaatgataggaaagagaaaagcatccagtggaaggagtccacgtaggtgtgcatcaaaagttaatatcagattacgtgcgacaaataccgagtacatacaagtaccataccaaaatgcatgtcatagcgcaaaagcgggtcgatggcgtcagtgtccctgcttcgggcggcctgcagagagtttgggccctgatctgcatctttttacccgccaatcgctatcttgcggtggacactgggtttctttacgtggtattccgtatgtacaggttttgttcgtctttatccatctgtacagtacaacatattaaggttgaatcatctgatctaacatatgatgtatggagtcgaatttggttgaattgcattacgttgacctctaatcacccctttacatgattccacgtaaaaaaacggtgctctgacctcaactagcacatacaacatacatagctggttattgcccccgaaaaaaccagatccgggtaataataatagcgaatagcgagaaagtatgagatactcatactctttggtttgacatatctcaaatgaagaaatagcaactccaacttattttatggtaagcataccactattgacatcaggctggaatagcttgatttagaaaatcaactaaatcattcatcactctcaaactagttgtcgggtagatgcgaatctttctgtggccaattccatactaatatctgtctctgtccacaaagaagactcttgaatatatagggatgtagataacaacaacataggaacgtaagacccccactactcccactagttaagggtggacgagtagagtaatcaaggacttgtagcactaggttttcagaacgatgagtttatagtactatgaggaaaatcacctgactgatctcgcgcatcagatcaatatcagtgtgaacgagtccgatgacattcgacggtcttgagagcatgattgatactcactgccccctggaataaagtggcatggcatgggtgctaacatcgttttgtacgtggtagttcatccgaagccgaaggggaaatagtattaatccgttcgacacgcagaaacgaaaggccgtcctccgtgcgatcatcaaaaaagactcggggaagcaaacaactgtatatagcttcaaaataatatctaattcctttgaaacttctgtacaaatgttgttgcttaatgcggcgctctccgcgctagcccccttgaaaatcaccccccacgaaattttagttaaaacttcacttcttgcatctcgcgtcctacactatcttctctccatcccccggaggcccgctttgcccacaacccatcattttacttgaggttttcagtttcatcccacacaatgaactctcgcgagcagtctgatatgcctccggcgccttcttacccgtctcctaacggtgcgcagatggcgcagggtgtgccctcgtattatggcaaccgccaaatgaccaccgacgaactgctgtccgcagaactttcgcgtgatgcgtccggtccaggtctcggcgaaacaaacaacggtgttcatcatggccagtccatggtgttgggttcctcaaacgctgccgacatgggtcgaacctcgtcggaggatcaacaccagcatcagcacatgctccagttccccccaagtcaacaggttggcgtcgaccccaatcacgacttgagctatggcgaacagagtgcgcgcaaacgatcgaagatctcaagggcctgcgacgagtgccggcgaaagaaagtacgataataactcccccaaacgcgactgtgaaacctgaaaagctaagacgcgttttcttttacaggttcgatgcgatgcaagctcagaaaccggccttgaaacatgctccaactgcagacgcctcggcgttgtgtgccagttcagtcgcgtcccgatgaaacgcggccctagtaaagggtaggaacaacaagtgcaccactacaagaatcgccagcgctgacagagacacaggtatatcaaagaacttgccgagcgactccatactctagagaaccagatgcaaccagggatcgtgcagcctgacgtgccctaccagtccatgaacgaggtatcgctaccgagagggtaccaggatttcgcttcgccggtggaatcgacctcgggcaatcgcaagaggacttactcggtcttcgaaggtcttcccagttcctcgtttgcacaaccttctttcaacgctcgcgtatcgcaaaatgccttcgacgcgtccgagacagcggcagacccgtacaacccagccgtcgccaacggtagcgcaccgagacctggtaatctgttctggagccccacgggtcatgagaatgacctcccaagcggccttgagatgacggatttgccaaagcatgaaggtgatgatgatatgacaccggtgactttggatgaaggagctcttgatgcgtacgtgcaatgtgtaatcctcgtaattacgagaaactaacctcataccggattgcagttactatcagaagattcacaccctgctgccaattcttccccacaccaaggagcgaacgttggagcttttgcaccaatgcaatcgcgaggcacaggaaattttctgccatgcgttgtacagcgttactcgcactgacatgtctcgtgtggctggcaatttcgagaagattaatggctttgataatgctcaggatctcctcatgttccacactcgccagccattgattatccatacaacccccgtcaacctaatctggcttcaatctcttttgctgatgatcatcgactgtgacacgcgtgggccggataattttgttctcaaagatggtatacccaagggcagcctagtccaagccgctaacaagctcggatacgatttggccaagagccaaggccagctcaagaacaagcgatctgtagatcccgacgtcgactcggatgccaatctcacccggcgaaactgggtgtctttggtcatcttggcccggtggtatgctatgagtgtggcagatgctaccgttctggggggtcatgagattggcggccgtgaagatgcaagggttgttggtcaaatcacaaccggaattgcgtgtatgttgatcttccttggtttacaattttactgtttcactgacccttttcgctccagcttactcgacattcctctcggagatggtcactttggtcaatgtcgaccacaacgtctgccagactaactccggcctgggtcgtatcatcggcgcgaacctagtctcgtctctggagcgtctagcggagatggaggacatattccagatccacgagctacccgagaactctaccactcgcccactttacgaaagcctccaagcacaactttactggaccgtccgtttgctcatcaagcgtcacgtctttgtatacagcccgtacgagatcatattctgcgcgcaggaggtaatcaacgagatgcacaagtcaaccatgcaatcccgcctcccatccccctttgatcttcacagtctcgcgctcgcttcaatgactcttctcgaggcgaccattctcccagaacacgcaagcgaatgctgggctaccctcgaaaaagttgaagagatcctcgactaccgctccaagcgtgcagcaaagggttccgagttcgacaatatcttcagcaccccggaatgggatgccaagatccgcatcttccttgagtggcgccgtatcaagtcccaggagagccagctccaggaagctgagctcggcggtctcgccaagtcccagcagcctgtgatgggccccaatgagcagcgttctcttcagcaccttgctgatcttgctgtcggcgccgagggctcggttggtcagaacgcgccgtccacgcccccgccaggtatttccaatgagcatggcgaaacggagcagaatatcgctcctcagttggcccagtcgcagagcggatcgggtcgtgttgttgttgacttcactatgctcactaaggagggctacctgaacgtcttctctgggttgatctaccgtcgtacacgttgagttgtttcgcgatcaagccccgtcttctccgcttaatccttgtgtctactttttttgtctgaataaaggaggcccctcagaaatcgtttctcattatgtaatatttgcgttggctgggcttccctatggctcaggcttcgatgatatcttttatatcttatgttgtagtcgtttctcggtcaaaaagaggggatctagctcttgaatggaatatcgtttatatatgatctatatatgtatccaattccaggcgcgaggtggcttacccaaagagtttcgaaatttcgaaattaccggttcgatgcaaactcaacaaacaaggcgactgtcaattctctcctgcatctcgctgccgtttcaccacagactacgacttttaccaggggctgtctaaggctcggctgacgggaaagcctctatagtactgcgtagggttttccttatcccacctttacttacgaccacgctactattcctgttgctttgacctccccgtatagacactacctcaatgagtcaaatagctatgctaatcttgaatagttctttgctagtgtggaagtaccccacatggaggatgaaggctttgacaggccattcggatttatcgtcactggccaatatcttgctattcactatcacggcaacgacttcgagatatgcagagactaccatgcgcgtggtgctttgttctacctttccgacgacggagaaacgataattcacaatcgcacatatgtcggcgctctcactgactatcccgactatgaaggagacgtattttacatccgcaatgggtcgcggtacctagcccaggacgggcagtggacggaccacacccatgacgctatcaaagtccaaattgacccagcgggagactatggcgatgccgaacctcccattcccccgtcaatttcaaatcctgtcgttgatccgggcaatcctatttccgcggacggagtcgatctttaccaccccgataaatggttttcgttatatcccattaccggcgatagtatctggtccggtgatgctggggagctggaaaccaagctatattttggtggaaacccgtacagtgatgggaggtgttttcagctctctgaacatgatgggaagacacggatccgctcctatgagggtaaatatctggtcgttctgatggaacctagtattgccgcgtacctggatgaaggctgcaagggacatactaggttcgatcgatgttctcggtgcaagctccattacactattggatatagttccgagccggacgggggtctttttttagttccgaggggtctgccaagcatgtttgtcctgaatgatggtcttttctactataaagtcgatgttcttaagggtagttattcagaggtaaagcgcgttgaagacatggatgatgcgtcatttttccagtttgtcgcctgaacatcacatacacaatgaagatcgagttgattttctccatatagcatgacatgacaagacaagacatgacatggcatgttatgatatgatataaactaggaaaataagatactaggaacataagatacggtattccagagaacaagcgaatagcagtcatccctcattgcctttgtccgaatgcaaatcgtctccatgttccatctacatcctcgcacagagtcatgaaactgtcatcgtcaatcaactcggacatccagttctcaagaaaggcaatgcgctcagctgttggtgaagaaagataccggacaagatggtcttcggtcatggtgggtgcttcgtcgtttggattgctagccggattatggttgcagttcaagttagtttgcttattctgggtttgcgatgtatcctgaacgctaggtacttgagatatctgttcggcggattcacagaccggagctgtgttttgggaagcagggggctcttcatagagcaataatggctggctcgcctcggggcaagcatttgtttgggacaagagttgggaatccggatcgggcaaattataatgatcattgggttcgacctcaagatgaggtggatgaggttctgggtctttgtttggcctagtgggttgcgaaattggcggcggagctgactggggatgcttctgcgctgctcgagacaagcttgcagcgtgcggctttcttgcagttggctttgagaagggcagatctcgcttaggagggagcatctggtttaactggtcgacgtcatggattgcagatatggtggaaagctgagagcttcgtggctcgggttcctggtttgagatgtgtgcgagagcagatgcatgcagtggttgagatagatctaccggtcccatgctttgggatgggaggttgagagctggcacagggcccaatctggacacagggtgtgaaatagtacttgcgggagaagatgctcgaatgggtgctatcgaagtcaaagtgtgagatcgctgctcgagcgatggtcagaggaatcgttacatacttgtccttccagaccccaacgctcccgtggggtagaagtggactccattgctgctagttgaagttgccgccgtatttgcagtccggggggcaattgaagagagatgccccgacgtccatgatgacactgaagggagtcgttgtattgctgggactggtattttgccttctgtcaatggacagttgatttcgcctagaagagtcaaggccatgaagtagtcacgctctgttgtgaacttgatctgaaaccgacgaatctgcagagttacaggacagtttagttaggaatcaccacccaaattgatatcagaatatacacacatgtgtttcaccgtgaggatacttgattgcaagacaaggcgactttactacgacagcaaagtgtgaccttgggggtggaataagccgggcctgcattcctgccatgcgagtgaagaatacgagatcaagctgctcctaaattcgataacccagatgttcagcattactgactcttgtcaagctttatgtgtaagtgaagtgtaccaggataccatcacctcgaaccactttctgaatcatcctcgatggcacagatccggaatcgagaaacttctcaaagatgcaagcgaggtctccattcccagggacatgattccaggtcaatggaccgacatggtcgatggcagtggttgtatgagagaacttggcaatggctaagcgaaggacctgaggagggatgatgggtggctgtagatgctgcatcctatagactaagagcaattcacaaagagtaaaggccgaggagttatcaatggatataatatagatgaagaatgagcgtggtggctagtgaaatgatgttcatgatgagggcgagattgagagaactctccgtcagcactcccactaattagcattgcccaccccattaccatgtataactagagtgtagctaaaccacttgctgtaagattaatgtatgtctttccttgtatctcattccagaatatttaaattcttgaaagtcatgttgagactcgaaaagatatgactgttgccctaggaacactctatgtaaaatttgtcagcttcgttggttgaatcattccaaaagaaaacatgagcatagaatacaatcaggacatgaagactgatcattgtttctattgtttctattgtgtctgtggacaaaataacaattattgaagaatgtgacagcctgaggccccaatacatacatcgctgagtcatcaataggaacaaccaataatccgataacgcgctctggacaagcgcggacttttggctgatcagtgccgttgatcgcaagcccagctctagccctccagggccgcaaggcattgacgattattttatctttgaaacgtatcgctgactttgatcgccgacgcgcaaatttactactcccttcaaacagccgttgctgctgagcactttgctcttttcaccgtcgcatccagtgttctcaggtttgaacgcgcgaaacctgcgactcaagccgagccacagtcactggccgtcgccatcacctctttcggtcagaatcaacattctatcgcctttgtactcagaccctgaagcagccccacaaagtcgcaagtttgacgcccctgcaatttttcctgctcgactcgtttgcacataaagacgtatcaagggcagcattcctcgagccgtctcttcaaagtctttgatcttgggaccagaggatcttgtctccgattttctctcggattctcgaggtcaagtttgttgatctcatccgttgcaagaaccgaaccaccccctgcgtttgaaaacgtgaacggcgcaacgctgtcgcgttcctttagcagcaccatgtctgcctctacccctcgcacctcgctgcgacgtaagactgccatctctcagcagacaggtgtggtacctatactaacaccacccacagagggcttacgccatgctccaaaaatcaaccaacccttcatccccgatacagcccctgcccgtcgatcacacacccatcatggactcacatcaccacaaccgccgaccagcccccatcatgtaaacatgaatccggccgccaatccccaaagcgcgcagttcgcagtcgatagctgggaaggaaaagacaatcgacaggtgcccatgtcgacgagggaagtcccgaccccagggaaccgaccgctcatgttttcccatgtgcgtgacccttcgaaaatgccccggcaattggattatcaagacccttatttcccgttgagatatctcgaggttccaagaagtcagtatccccatgcatcccatgaatcggctagaaatactgatggccttgtctcgttaagcggatcacatatacaaacgtgcccattatggcctgcagtcaggtattccagacgaagtcgactttgcgctgtaccacctagtacaaatttcaaatcagcggtgggataaattcaaatttgaaggatttcccttgcttgcggaaactttgatgcagaaagcacttgacatcacacaactctgcacgggagtgaagtgggaattccagtatgatccccggaagccgacagaccgtgccaatgtgctcaattcgttacatggtacccgggatattctggataaaattagcaaaatcccagtgaacctcccggacgacagtcttgagacctacgacttcaatcatcggttgagaaacatcaaagaggccacgttagtcttgcgaaacatggtgctcctgaaagagaacgcgttttatgtgtcgcgttatgcaaatggtctattgcgggatttcttggtcatcttgatcaatgctcccaatcaaccgcgactgaatgaaatcaaaaatgatgcactggatatcgcggaagaggtcaccaaattcttgcgaactgaccctgaagatccgctgtggatctctttggtgaattgccttgactctccagaccgcgcacacgttgtgcggtccttgtgggcgttgacacacttcggcactgagctggacgatgcggatgcaaacagggccatggaaaccctgaccagaccgactctccagcagatgtattatcacacgctccttgacctcgacaaggatattctgagtggtgcactggacttttggtatcagtacacgctcagtcatgataatatcgagacattgatggatgttgtcaatttcccaatcgtcttcgttcctcgcatgatcgcgcttttgacctatgaagcacgacccaccaaaaaagaaactgttctccaggaagaaaaagttgcacctccacccactgacattccccgtgtatcccccgagcttttggaaaagctcatggaactgtccgaaccagagcgaagctcccaatggctccgttgctgtttcatcgaggattcagaatgcgagatcacacagatcgctttatggcaagcctaccagagccgatttgcagatccccgtgtcactggagggggtgttcttcccgctgcagagtttatcaaaaacgtcagcaatacattcacaaatgcccaggcccaggtcatcaatggccccggcactgccaccaaattcattatcaagggcatccgacctctagaaactgcgcacacattcgagggcttcccctattcctattgcagatgggctgacaattcaaagccctcaaagatgtgtcagcgtgcgttcacatctccgacagatctccggaaccatgttttcggcgaccacatgaccctggaacccacagacactcccggccagtataagcttgacgccgcagagtctcccatccatacgtgccaatgggaccactgcacacggttccgagcatctgggcccagcgccaacacatccatggtggcgggccatgtttcctcgcatttgcccgaagaccgccccgccgacgcacagcccacaaccgccaagcgtgtggttctccaagagcgaatcgtccgcaaatggtattacatggatacaccgatcaacgaaaagggcgagccatttggcgtggcctacaaggctgcgttggtgctgcgcaacatcgcccggggcctgccgaatcggaccacgtccaaatatggtggacttccctggaagaaggcctgcttcacgagccagcgccccaagatcgtcgaagtctgggaccggaatcgtgcgctgcgcaaggaacttaccgagttaatcatggtgattgagaaggaggtagactattaaatttcctattacatgttttccggtgtcgcaacggcttctttttcgtttatcatgaatcaatatctctgtacgattaataccctgattattcatgttctcactgtctttatggttcccaggtcctctcccttgtctcaatgtacaatatccaagagccaggcccacattggtggtgttttcttttttctgctttgtttttaaaaggcttgtcgctttgatctaagcctaaatccgcgcgcaaaaaggcccccgaaaagcggagctgcattactacctaggtatgggtatgggggtgggatgtctgactttttcggcgtctcttgagatagacattcgagattcgttagttagcaaactgaggatcagggtttaatccacgctttttttcgttttacatccgtttgatttgagtcttttaacctatacgcaaaacaactttcccctcatcccctcgcctcagcagcctcttcctccaaaacccgcatcgcatcctccgccctcgcaacgggtacgtagatatgatcgtggaaataaccgctgacaacattggtactgataccgtggtccttcagccggttagtaatggcagcgatcaagccgacggcttccaggctggagtggatagtaagggagatcttcttgcagggaaagattggctcgttgaagtcatgcgacgtggcgagcgcttctgttgtcacgatcgttgttccctcttcttcttgcacgattagttgcggttggagtgtcgagagaggtagtgagtggaggggtgatttggttgtgaggaagacgtagattgctgggtctaggcttggttgcattgttgccagaagaattgagatatttttttcacctggaggtgccattttggaagttgaagtggaataagtagctctgatgaatgatatatagggatatggagtggatgtcatcttggggcatggtttagctcgaagaaattaaccaatgagagcacaatataggatctacgcgaaattttgatagatgtttgtgataggaaaatatgtaaacttgcctgaatactccttaggtttctaacgttggcgatctgtctcttagctgtactataacaataataagccttagagaatactcggtccccgtactatcatttccctatttacttattacatcagtctctcttgttcaacaatgtagccaagcaatgaggtgggcgataaccgcataacgagtgattcatcgaaatattcttttgaattctggcttatatagagctaacaagctaagactagactatggaatttaacagatgtcaatctacgtaataatactagcaataataatatccgaaaaagaacttcacacttagtagtcacctgtaggcattccacccacagtcggaacatgctgtccatggaatccgaacccaacggccccgtcgacatttgctcgaccaagctccgacaaattacgagcatcgaggcagagcagataactcttgctacgcatcccgtcgagaaccacactaagaagtacgccatcatcctcactagtgccttcggggttagcgacgaaaatgggctcgccaggcgattggccgtggcatgcccagagctgcacttgctgggtatcacaatcgagcttcatgataccatctgtcagagttgcctctccgcggaaggtcacagcgtagacatatcggtgtttctgggtgacaattttcggattcagagttggcagctcaggcgacaacgatttgcaaacagaccactcgactattgctttcttgggctcggtgcatggggcggaaggcaccgcaggcagtcggaaccgagtaaatgatgaacggaaagaatcgtctttcttcttttggaaggccttggctgtatccaatgaagagatcaaattctcataatagagagattgcaaacattcagaactgtcggctctcacgacatctgcaacaatatccaactccgccggattctccttcgagggttcgagccatgcgttgaccgtgtggaagcaaaagaacgcagggctttcgtatgtcgcgatcaatcccttgccatgcttacggtcaatgacatgccacactgccggctgacttgggtctgttggcgagatcgcatctatgaacgaggagtcaaactcccgtggctttatgtgcgagttccacaaacatagcaaaatgtggtcctccgtgatgaggaatgagtgaatataaacaggtgttgcggggaaggttgctaggattgtggtttccccagtcgaagccgagaccccgaaaacacggtatgtacaggttggtcccagcgtgagattataattgaacatgtctcccgtgatagggtcggatcgggcatgagatgcagcgaggtgccccgaaagctcagggtgtaaacttgtctgcgaggccaggccgatgggctccagggtttctggatcgagcttttgaaaggcgttgtagtcggtcttcgcatagagggttcggattgctcgggaatcactccaccgagaagctgacttcgactcatcgggcttgggatcaaggcctggaacattgatcgaaagggtgacagatatgttcttactcgacggagtgggttgcgcgacatattcagtctggactttgcccaagacgctcttgcagggatcgcgtttctgtccgaaactgatcgtgcgcagagatcccgtcttccttgctagttcgatctggtcatcggttgagaagcgagagttgtagaaaacccgaggtgaagtacaggagtcatctggagcaaagatctggaaacgatggttttgaccgaatccatcgaaccagtgggagagacgcagtgtttctccattctcggcttcgacatggctttttcctggacctgtgcggtacagaactccagcagcgtaggcaggaatatgtcctatcacagagagctcgacgggtttgcgctgttcgtattcaggatcgaactaaacagggatgagcatgtataattcgggggttctaactatcacttcacttacacccttgtcattgggccagttattataataatcttctgtcctatcattctccatggctattggatctgggccaatagaaggcatattctccaatgtgacgtgtcttgagattgttgcctgatattttaggccaccaattctgtttcttcccccttgtcgttttgtcgaatctgatttactgaagagattgataagtggacaatctatgcaccctttatatatttctcaaacaatagacttgtctgctgggcctaatctttgtgttcgtcatgggcggggcaatcgcgacgggctaaatctcacaaccgacttctccctttagctcgccaatcgccaacgtcgaattaccgagtctcgctcatcatcgtcgctttgagccgcgccaagtctacaaccgacttcgaatctcggattgcatattcaattctggtttcatccggggatcttggcgggatatacccactcgaaggctgttaatagcccgtcttccgcaaatgatctatcttgtgagatccacatctgaggttgtcaccttttcggagccttctattaaaccgacgccaaccccccatgaagcaacgagtacaaaagccagagaccacaacaggcccaaagatgtggagatgtaaagaatgtccctccaattttcagcgattagaccatatgaaacgccatgcccttactcgtatgtttccaataatactcagatggatacagtaatgacttgccacagatcaaacggcgaagagccacatctgttcattttgcggctctgtattaagccgagggtgtgtcatcttccatcacttccgaagagagatatctcaccctgtcatgtgtgctgacaaaaacacctagagatgtgctacggaggcattggaaatcgtgcaaggcccgtgtggacagtggccatgcaatccccgagccggagcgcggtggaaaacacaaacgtgcctgtgatagttgtgcaagcctcaggaaagcctgtaatggggaaattccgtgtgcggaatgcacccaacgagaaagacaatgtacttatcaacgccttctcggcgacgagcttcccttgccatccatatcgcaggctttattagggaccccggacgccgaaagttcaggtgtgaataatgatgcccctaaggttgctgagtcaagttgggaccttggccctgcaacgctttacccaactcgtacggaaattaatgctcgacttcagaaattcgcttttggctgattagaaaggccaacaatctgttcttgacggctccctcgcctttcgtggcccgcattgaagattttcattctgtttcgttaaagtcattaaaagtaccatttggtgtaactattttttaatagattcatctttaattatagttaatttagaagagttagtatatgaaattgtatggtattaaataccatataggcgtatatagagtatagactcggatatactaaaggtatacacaattccatgaatagaggtaatctcttctttttaaaaagctttaatagctaataagaccctaccctcctactctattgactttatagacaatcgggagcatattggtggcatggtaggtggttgaattgacaaggtactaatttacggacgcgttttggttggggtgcgcagctcggttgcgtgcgcagctcgcttaccgaatacgttattagctttgaaggataggcatctctgtgcaatccaagttccccttcactggctccccgatgtgtagttttcaccgtggcaagaaaatggaatcgacgctatcgtagacattgtcgataaagttctcatagctcaaccaagccgtgtcatcggagctactttgcagagtcgggtcgctgaaatccatcgcatcccacacattgggccagggcaccggcgcaaaggaagtcggcacttctgcaacgtgcgagtctcgtggtccatcgacggcctctctcaaatcaagcgagaagttcgtaagatcctgttgacgttcagattgttccgagaaaagctcaggagaaatgccgtcaaaagagtattcttggcgagaggcatcaataccgagaagctgatttctttgcgttttcgcctgtgacatgagcctctctaaaggtttccagagcatgccctgttgagaatctgcaattacgagccgcgagcggtggtagacatcttcaacgactgtccagtactttgacatcaccgtgggacttttgcagacgcagagttcggcaagagccacggccaatgcgtgccacggaacccacatcgactggtaccaccgccaggacctggaacctgggtggttgtatacctcctgcgagcactgcaggttatcagctgcgattttgagaagagcattctcctggattttcgggggtatgaaattatagctgcgttgcagcggccggagacatgctagctgcagccagctacccataagacatgctgtcttctgcgcgtaccactggaagtccgacaggtcgggcctgcagcctcccagaagtactgacgtcttttgttggaaatcgtggacgacttgctgccgcaaactcatgatagttacggctggctctgtgacgtccgaaaatgcaagagttcgagtcacggacgcagccgctgcgctaaccaaggtatgcgtcatgtcggtaaatgtgccttctgtgtgttcggagattggccatgtcatgtcaaaccataggtcctcgtcgttgatgttcaaaggtgggttgtaatcgagccatgctgattgcatcatcggctcggatgccctgtctagggaggctgctacatcgagaaggccgattcccagccatgctcgtttgcgcatctcgtgctcaaaagggcgtacggtgaatggcggctggggcatgtggagagataatgcctgccctactcggagtgccatgctcaacatagtccagacccttcgactttggtcttgagatcgtgcggcgagctagaagggtttagattagaatttcaagatgaaggagcacgaagacgataaaattgtagttgtactgaccagagagataatataagcttgcagaacagtgagatcgttcgtcgtgacaaagtccgcctttgcgagtgcagattcggtttctttttggaattctgcgactattatcttcttgctcgtgttgaacattgactgagattccacttcgtcaagagtacaaacagcgcaaagataaatagccgaagcaagggtggctggtgcctggtgatcctgctcatagtcaagataaggcttgccatccctaataaatgcttggagcgacggccgatgtaggattttgaacagaggatcgacattgcggaagaaaatatcacataacctgtgccggatttggggttgaagatttaatcgactgttggcctggggtgagttcgacgaactgtcggggctttctgagctcagaaccgacacaccaaaaccagacgctgaatctttgatatcgtggttttcattttctagacgatcttccaggacactgcgcaattcctgggtctgtgattgtgacatgagtcaatcacatccccaaatcataagtttaacaaacttacttgctgcatgatatcctcccaaaatggaccccccacatacgcagttgaagggcggggaagatgtggctgggctgcaccgagcaagtagtcgtgatcctggtgagtatcaggaccggtcgtgctggcctccgccaccgattcctgctgtgtggatgaatgcgaaggcacatggacaatggaggaaatatgcgattcatcacctcgttcatttgcaactatctttagaagtttctcgagtctcgctacccgctcggatagttccttgtccgagcctacaatccgctcaggctttcgcgcgcggccgcggggtagacgcgcacgttccacaggaatacacacgaggccaagtcgctggcagcttgtacaaggactcaacttgtcgcatttcactttgcgctggcgacatgcttcgcaggtgaggcggacccgtggtgcggaggaccgtgagtgggttgtcccgacttggcccacgggatcggccattattcaccggaacacaatttgtgtggctggaaatgaggtaaatggacttgagatggattgttcaattttttcaatgtacatccatgcttgtcgaagatccaaggcacttgcatgcgaggttctgcgccacccccgcgaagctatcgatccatattagcttttactggccaaccagggcttgaattggcactttctgtatttgcggatgatctgcgcacctcaaatgcaaaatgcaaaaaaaaagaaaaaagaaaaaagtgatgaatcggcagagttaatcagtaaaacgtcaaaaaggcggtaggctaagcggtgcaatctacaatacgggcaatattatatctgcatgcttgaggctaaccatactaaccaatcatgagtcatgatgataacctacaaggatggaaatgggtgactatgtgcctaagtacctttctatacatatctaaatcaataagaataatagtctttcttggtactgtttcagatgtctttttagctgttttttattaattatacgaagaagttaaggtgacgatagatagggtagaatttagaactagatagaggcaccgcataaacctatgatatatctctaatctctaaacttttatagaaaggtacttggatggtatcatggtcgatatggtgagaatactatagggaaatggtagctagtaggatcagtttgctatcaggtacctctctctcgttcctgctctctctcgttcctgctctctctcttcctccatctctcttcataccatctgctcttcttatcctcacagcacttctgcaatgttcgatccggcatatcctccttctttttactttatgctgaagcttcttatcgttctcttgacttatcagtgatggctgatccagctcctatcctctggccttcgcaccatcccagggccataactcttttgtcgcctcgcaaaaggcgtcgttatcttcgtggatcagaagagtcggagggtgatatgagtctggagcagtacatgcactcctccgagatctagcggtcagtgtcactagtccactacctctaccggtgaaaatggagactatgcctgccctagaacagaggatcagtccactttacccggagattgaagccatcatgagccggcacaatcttaatgtcacctcaaccttccaatgtgggaagatgagcaaaccaaactatcctggaggtgatatccctttgaacttcttctgtatctctacagagactactcagaaaagagagtcgttacccaaggacacggagaagtcctagtgaaggtggtacttgtggggccatggacacgcgcaaattggttcgagctgcgaactcaaatcatatcagttttcgcgatataagctttatttaaaataacactctgatgtcttatttagacgtcttttttactagggtttcaaaaaggtagaaggataatattaccaatgagaataacagtagggagcagccataccgagcttacttcctctataccgtatgataacgtctttccaatgtataatggacatcactagatcacaatcaaaatgatcgcaaagtactccgtattatccttcaatagtcgatgcttttcttcaccgtcgattaattcaaatactccggcaccgtgcgcgccgcccattcccggttgggaatatacgaattagatcggcatccttcagagttttcgatttcaccgagagctagagcctttgcaaaaatatggagtattgtgtcgtgaagttgtaattagggcagtaaatattcaaatgtttgaataatcaagatatatccccgaactccccgagattggagtttcaggttccaggtttgttcagatgcaaaaatgggctgcagaagtgagtgcagatcgcaagaacaataggattgtactgccccacccctaacccctcctgctcctattgaaacgaagaaaccattctgtagggtcttgatgggggggttatttgacgctattgattttatatcataggacacccacgacgatgtagcccggtttatgggggtaagacgatcttggccgtgagtggaccaatcgctactcagagtttttttcaaaaaaagcaattattcccacgctttgggggttccacgcacccacctgcagtgatgcaatcccaagcaggggagagattcctattatgtacatataggccgacaaagcaagcatggatcaagcatttgaatcgacgaatcagagaacgttttgctgaaaacaaagttcatgccatgcggagaccatgtggtcttcagggcatccttcaacctcctacctaccctcgtaggtaacctgtactccgtacgtagaagtatacgccgtatactcttgacaataatctgcaatttacggtgtacggtgtgcagcggacatgacaaatatcccttatagtcacaatgcacgacacaaattcccgctttctactgatcgccacgtgagaatgggcccgctaatccctagtcccttcggacaaccaggctaatgggacgaatatgaatgcatatcttatcaaattaaatacttgtctactattgctccatatctacctcggtggctgaatgtgatcttcaaatccggtggagagggacctcttacatacctcgggctttattttccttttattgcgtacgccatactttacggtctcctatccctcctttgtacatatgtattgagaagcgggccattccctaatcccgggatacttgatctcgagcattgagaaagtgccgttcatatctactataagtcaaccggggaactttgcgatctctctttcagcgcattcaacacccttctgttcatcacaatccgtgcactaaactgggccttcactcatttatatacgcctttatgacacgatgactactctattgacaccccgtggtcaccaggccctcgccatcagcattgtgtttacgactatagcgacattaattgctgccgtgcgtatacttacacgagcatttctcgtaaagcagatgggagcggacgactatgtcatcctagtctctctggccttctcgtgggttttcttcggcctgatggtcggcgaagtctaccacggcatgggtgagcactatagggatatccccgctgcaaccttcaagactcagatgctcgtaagttccgcagcagaacatccctccaacaaagtgcggttccattgacatggccctcttacagtacttctgggcttcagttcccatatatcaaacaagcctcatcagcacaaagatgtcgatccttctccaatataaacgagtcttctccacaccacacatgcgccgagcgtgttggctcctgatcggctttctaggcttctacggagcctggaccatcatcagcgcctgggccaactgtgttcctctcgcgaagttctgggatccaactgtcccaggcttctgtttggataaaaaagccttgtggttctccaactcggccatccacattcttaccgatactctcattctcatatacccaatgccagtcttgaaatcgctacaattgcccaagaagcagaagttcgctcttattgctgtcttcgcgctaggtggattgtaagtccgcctcaatatgatgagaatcatttaacaatactaacaatcattcttccagcgttttgatcacaagtatactccgcctcaaatctctcctcgttatcgccaactcaagcgatccaacctgtaagtactaacaatcacctgcaaaacccttcccttatccacgagccaaatctaacaatctaccccagacgacaatgtcggcgcagcaacctggtccgcggtcgagtgcaacgtcgcaattatctgcgcctctctcccgggcacgcgcgccttcctctccaagctcctgcctcacatcttctccacccgaagcaacggctaccgcagcaggaccacgcgacatacgcgaaacggaaatcccctcacagcaaacggcaacacgcaagtcctggcctctgtcgtcggtgggcgtggtcacagctcggattatgaccacgatctggaagctctgtcgccgtctggttccttcaatagctacaccaaagagcctgtgaaggaggtttttgcgggaatcaaggtcacgactaatgttacgcaggagagtacctcgcattcgaagattgttattaatgatgatatgggcagtacgaaagaattggtgaagaagcatagcttttgatttataacgatttgggttgggttcattctctatactttctttttttttctttttcttttcctttcttgtctggtggtcttctctcttgttttatatacctatggctcttacgtggcggttctttggcttttacgcgatgatatacccaattacaacactattaccatcgaatatccaagatatcaccacattctcgatgtatgagggactggctagtgattcattgaagccgcggatcaaaaaagatctaactaatcaatttacctcgaagcaaaattttatcgatgttatcagacaggacatggctagaattaaaacaatcattttattaaactatggtcgttccagacctcaagggtacctacacagtcttcaaacatgagctctagggtattatggatgcattgtaagacaagtgtacagatttcgaggcgaacaaaacgagctgatcattcagtatgcatggaacccgcccactgtacattcgaaagccgccaacattttagagaccaagagctcgtaacaaggaagatataaaagggaagaagagaaaaaagaggaaataattctaggaaaggatattgaaaacgattagcaccggtatgtgcaatcatgcttgcaaatacgcagctgtcctcgtgcaaatcctagaaattcaatatagtggtagaccttagatcggttgcaaagaagatatactctactcccaaacgttggaaaagaggtcgtcagatccgccaaatccactagacttgttatttgtgcttgtagaggtagggtgagagaccggggcagcgctggcccagccgccgaagtcctcgtccgcagccacagtgggtgcaggcttagaagcagcagcactgggtgcgccccagccgtggcccacgtcgttcggagtcaaggtatctggtaccttcatcatagatgcaggcgagggtacggcatgaggcgatgaggcatgatcaggtgtgctccacgcgttcccgccccatggatcaaagcttccagacatcatgctggctgctgctgcgttcgcagcgctggtggctggcgctttcaagggggcaggaggctgcattgggggagcagaaatattaaacgcagatctcatttcctgccgaggagaggttgcagtaggcttcgggggtgggaccgttgaggcttttgtagtaggcgaagaaaatccgaacaagtcatttgacagggacgatgatggagggttaggcttaacagttggagaagtaaatccaccgaatccgaaatcttgcccactggagatggaagttgttcgggactgagacttcggggctgacacggttgcggaagtgaagctatcgaagaagtcgcccgtagaacccgagggtgatgtaaccttcggggcagcaggggtcgacttggcgccgccgaaggatgagagattagagaatgccgatggcttctcagccggtttggagagtggaggagaagtagtggtcgggaagctcagtccactgaaggcgtccgtaagaccgcccatgtgagacgaagcggagggggcaggaggggaggccatgtcgccgaaggagttgccccgctggtgctgcacggttgatgccggctgcggcttcgagtacaatgacaagattgactgtttgaggtctggccgagacattccggctggtgttgctggtgtggatgttgtgctagacgggcgactaccagtagaaggctgggtgctaccgaagaagtcaagacctagcaatgaatcattgggtttgtgaattttggctggtgcgggctgtgcttgtctaggtggcagacgcggagcaggttcggttgtgctagggcgattcggaggagagatatcatcgccgaacaaatcaatcgaggcttgttgacggtgtaccgggggctgactggcagcggcggctctttgcgaagcggaacgttcaatttttgctttctcctgtacaaccgcaagaggctagcaagtcagtggttactgctgacaagatggtttatcatgcaatcactcaccacatcgtcatcgccgtcatctagagttgaggggtccggaatcccaccgtccattacccatcgcttgctttcgtactttgtccggatgaagttttcgattttcctattcacaataattgtcagaaaacaccaccacacaacgagtaccattagaatgcccttacgcatcggagggaacgtggccgggtgccagctttgcttcccagtatctgcatcctattagcccatgcccaacgtggtcggtcaattggttgcgacgaacttgttggctcttccattgccccatctcacaacactctgaagttgttcatcggtccacgaatcgagatccacggatttgactcggctgatatgcgtgcccataccccggtgaatgcccgagcaccgaatgcaaacaaagacacccaggttccaggaagcccatcgcggatctattcggaagacaattcagtatatgagcgccaagaaatatcctcggatatgaagccagcgtagggcgcaatttcaggaggggatcggaaaccactcacgcttgttccgtttacagtcggcacatatcttgttgtgctcgagtttcagcaaagtcttgattgcctgcgtgttttgggcggcttggcctggggtaggacgtcgagacgacataatagtaacaactcaagaatcgatggtgaaaaagggatagggaaacaatgagagccacctaattattcttaggtggcggtcggcacggttgcggcctaaggctatcggggtgtatacggatgagggaaaatgccagtcacgcagtttggtataaggtaacatgaggtcattggccgataagagtagatatttggaaagataaagtacattgtatattgtattatatttgattttcactgaattaagctctacaaagatggttggtccactcaaatgacgcctctcccccgtatcatgcatgccggctattctgcagccttagtccccgcaaaccgaatgatgattaaaagtcatgaaaatcccttagaccttcgcctgagggtccttagctgcaccggcatcttctgtaaatcgcagactaacactattcacacaatgacgctcgtccgtgggagtcggatacccctcaccctcgaatacatggccaaggtgacccccacagttgctacacacgatctctgtccgcttcatgccgaatgtgctatcaacatgcctagtcacagcaccagggatggaatcaaagtatgctggccaaccacagccagatttgaacttgtgatcggcagtgtaaagcggcgcattgcaaccagcgcaattgtagacgcctttggacggatagtgggaatcgtattcaccagtaccagcacgctcggtacccttttcacggagaatacgaaattgttctgtagccattctcgtaagcaaatatcaaccgtatattgcgtaggagttgaaactccatggtgtgcaaacctgggttcaaaacagctctccactcggcttcgctcctctggtcgggtggcgacatggcttcggttgctttctcggggctggggttggagctgaagaaggcaccgaagaatggaatggtcggtgcagccctaagaatcctggtgctcgtcttcgaatgaggaggcttgcgcgttgaggacaaaaatcgggagaagcaaaatggtggtgcaggtcgggtggggatagtctgtcgtttgaggggcgaaataagactacgagataggtgagatcgcatagagacgagttgatggggaaatgagaagaatttctagtgaccggcaattgatgcagagatgagagtggggtgaagctaatcctatatggcctaactagttgggtgaactgggtgcatttacgtcatcatgcggggagacggttcggggactccttgaggcctagactgatatcgctgtacaagatttatagggcgaatagatttttatatagctcgtaggctacgctgttctaaacccgatgatttctttctgaaaaaaaaaaaaatgtttgattaaacagccccaggtcccacctgggaaaactccggcagtgcaggggtatcttaacaacaaaatctgacatatgaacaatattgaagaaaatggagaagaaaacaagtcaaagaaaagtcaacggcgattcacgccggtcaccaacatggagccccggttgagctccacacgccacccctccttcagcagcatgttccacacggcgggtccaatatgtgacttgcggtcgagggagtggtgaccaacaccgcacacaatgttgaacccgccgtgggagctctggcctccgccacgaacgtacttctgatctcctagtccgtcccaccacgcctggactctctcgcgagcaatcctgaccgcgttgacgaccgtcacaccatgcagatctaggtcatattgcgacgactggcgggccaccagccggtcagaagctgttgccaaatgacgcatggcaagctgacgttgctcgtttccaacgtcccggtaataggcggaagcgccgccgtacagcgggtttgagcgtgcgcggcgggcggcttgggatgcttgggcgagggcaactgatcgggctgcgaagtgagagttggcagcggcggcagcttcatcaaactccataaaatccgaagcagaatctgcctgctgggctggcgccacgttttcctcctcgtcgagtgcgattggcgacgaaacgaaactgatgatatttgaaatgcaagtgagatcagggcgacgggccaacttttcagccagttcatctgcggctgagatctgattgcttgatatccgaaccaagcctgttagagtggtggcattgatgccggggtacttgtgactgagctcccccacttgtgtaatgagtacaggatcgtcttcaatctcctggatgtccttgggcccatggatctgtgccaagactctgatcgtcgcaccgagtgacatggagttttcatgataagtcgatgcgattttctccctttgcaaagcgctggcccgcgaggaaagaaactcgatatccttctttcctgcctcccatttattggcagaggtgttgttcatggcctgggatgccagttcgattcgacgttgttgttgctgcttcttcttctttcgagatttcttactgccgttctggttctcgttggcctggaagccatcgattgacttgggagtggagaattgaccgccttgagcagcctctttgggggtttcttgaggaacttctctggcaatttgtgtctcttcgatgaaagcaagattgagcaaaacatccatcgaacgactgaggttgtcatgacaatcttctaggatgcgctcggcttccagacgagtaatacttgggaacatgctaatcaagttttgtgccttgtcagcagttgacatgcccagaaaggtgtatgcaagcttagagcctttgagcttttcggcatggcaactagcactattggagtcaccattgtcctggtcaagactttcgagcgatggccagcttgtgaaatccgatggtgcgtcgtcagacgattcgccgcccaaagagcctgaaacgtcagagttccggaggttcgttgtgcctgtggggtcaaatggcaagtctgcttgctcaacagcagatgcgttcagcaagtttagggtttcgcgcaactgttcgacctgagtggggatcgccaggtcaaagtccgatacgatcgcaacaaacaatgcaggatcaattggtggacagtaggtgctttcaagctcctaataaagaaatgggcattagagcagagcgtgacaagtgactagtacatcacgctatgcctacactgtgcgtgaatcggtgggacgcgacgtaccttgaagagctcatcgccacagtcccccatggctgtgatcatggacttagttgcagtggtattggatgtaatattgtcattccctatgaaggactgcgaggttggataattgtaaaaggcgttaggggagtgatgaaggtgaaaagtggcttttttccgtgatcttaatagctttgcgataagatacctagagatagagatcgatgcggcccggaagtaatgaagatgggggaacgaatcacagagccatacgacaagtcacgttctagtatcacgtgggtggggtaagaaatggcacgtgtatatagatcacgtgctcgggcgagagttttgaatggcgtggctaagcctcaaaacagaactgagcggagggttgcttttcatacaatctagaaactgctacctaacaacatgtacttgttccatcctatccgccgaaatctatacttgtgcatatattgtaatatctacctctgtaagctctacgaatgtttcttaaccatgtaaagtacacactccattgtcatggagtctgctgttcatccatccctataattaccaaaatgctggcgatatgtattctttttcgtctagaatgatttgatatcactcaccggtcgatccctggatatgtatgaagagagtcgttctattctgtatgtaggaattggggttttcaaccttcaatatgacgttccttcccaatatcctaagctttaaggaatatgaatccaagtcagagtaatattgatagtatatctacgtaggcacaaggacgaactaagattatgtttggaacaggctgtgattcattcatgtggggatgttaagcgttggaaaagaaaaaaaaaattaatgaaatacagacaaggtataatcgtgtagtgtaccaaagagggagagaaaaaggaaaaccccagacgctatgcgaagagataaatcagggcttgtgcccgaacaccaggcccacacattgggccagatatacatactgcactccttagtgccagatgaccaccgagccaaaaaaaaagacgcaggaatcaaacaaagaggaaaccctccgccaaagccgcatttcaccttccctgttgctagatgccgatgagtgcataacgatacgagcccccttgagaattggtacacggggaattatgaagaacatttggaaggatatgggtaatgcatgaaaatgggagaacgcggcttgagtgtacatctcctaggaacatcctgaaccgacaaaaagcatgggtatttccgtgagctgctagaaacgagaaagcagaagtgaaatagaaagaaaacgagtgaggatgccagccccagatcaccacatatcatcgtcatcgtcgtcatcgagttggacgtcgtcgccaaaggacgtgtttccgtattggtgacctgggccataagcttggccattttcatagccctgcttgtcgctcctcgaatggctaccgtagcgatcatgcgaatcgtcatcatagtcgtacatggaagagtcgtcataggcactttctccgtagtgttgttggtcctgagactgtgcgaggctgttagcaatcttgctttcccctaggacaaggggcatcttcgcctacctcttggtatcgctgatattgcgcatactcatctggctgatcccttgattttgatgatctctgggatgatccagatgaaacaactggcatctgcgggtgcatctgctgtaccttggccaggtatgagtacatgaagttgctcagcaacacttgagagtacagagctcgccggggattcgcaagcttgatatgcgccatccggtaaatagctcgctcctccaaaattgagaagcgagaccacggataatcgacgtcggcgcgaagtactcgcatcggaggatcaggagaaatgtttcgtgacgaatgttttcggtggtggccttcattactgtgtttctttcgcccaccgccgaaaatagaagagaaaataccatccttttctttctttgattctcccgataccctcctcacgttgtctttgcgtcgatcttcatcaaccttcggatcaaggcggtccaagacaacactttcccgtccccgcggagtgctctcgatagatgattgtaaaacatctagacgtgtgttatcatgcgttttgtcgacagtctttgatttagtctttttcgagtcggcgtccttgtcttttttcttgtctttttcttcgctgcccaacaaccagtgccagctagacttgcggctaccatcagattccttcttgtcttttgatttcttgctctcggatttgcgttcttcaggtttgcgttcttcaggcttgcgttcatcgggtttgcgttcttctgagatggtgggtatgaatgaaagactgtcagtgcgggtactgttgccaggtatcatctgagggttattggcgatgtcaatgagtgaagatgcgggttcgtggggtggtaggcgagggttcttgggacgtttcggtatcgggtcctgcgaagatgtggatttcgatggcgatggagttgtagatgccgtggcatgatccgatgactgcctactttgtgaaggcggacttggtatgcggtcgggttcagtggcgggaggtgtttcaattattgcagggatcttctgctcgcctggagctatgttcaaggtagatcggccattcgagctgatacgagaatgccatttccgtgtattggtcggatctcccgaatcggatcgatccagatcagcatccggatgcccaccagaggtcgacaaggcttcctgctcggcctcaggctgatcgacaatcgaatcgaattgagaactcgtggttgagcttggtgcataagctgagccatgcgatgaggcagaggtagctcgagccgctcgcgtcgttttgggattagaaccagtggagacaccggtgagctccagacttgcgggatcttgaggtgagcgaacacctgcagatctggtatcactccccgcagattcagataccccccgtccgactcgtttagaatagggcaacttttcgccctttttcaaactgcctttcttatattgtgtccgagtcgaccggcgtaggctgtttcccggaggtgcgggaggcaggatcggcctgtcctcgtttcctgcaatggcaatattccgcatgccgcgcaagagtgattctttggccaccacttgcgaatcatccaccaagctttccaactgctgcaagttgggactcaacatcccaccttgcttatttgattgggagcgttgatgttccaaccgatctgcaccatctgtataacccgccgaattgtcgatttgtctcgataacatagagcgtttgcgattaagaccacctcccgacccttgacgttcggcccctaaggtcgaagaatcgccggatctgcgctttatgaggtcggccttgctgtcgagaaacgacttgaattctttcggcgccagttctggatgcagtcgcgcaggaacccaaaataaccgagaggcgtcatcttcgtcggcggagggcgagggcggtggtgcgaagcctgggaggtcagggtcaccggcggcagccacatccattgacatgcgccgaatcgcggcgagattgttgagttcctgagcgacggccgcagggttggattcgtagtcgatatcgttgagaggaaaagaggacgttgcagtgtccgagggcaaacgagtaccatcggcattccccggatcactttctcggtcataagatcgatttgtgacaagcggtggccgttggtttccatttgtctgtgtcggttgcccatctgacgtggattgatgcagtggcgaggacggggaaagaggagactcagaccctgcggcggcgcgcgggatggttgttattgactcgccgaggggggttgttatataactcaggcgcctcggatcattacgatcgtagtcgtcgtcgtacatatgtccgatagcttccgtcacatgatggcttggatcgctaatcgatagatgggtggcatggcctctccgcgtcgcatgcccgccagcctcgtggggacttgtggaagcctaaacaggtgcaaatatcattagaatcaagaatgcgccagtttagagtcaagatccaattctcagagtccatgggaaggggtccaattccacaagaatgtgattgtagttgtgcttgaggggttcgaggttgaggggggtatcaacaaaaaagtcacgcccacatgaactaaataccaaggaccgagaaagcgacgcacctgcatggaaagccagtggtacaggaaccaaaagacgccaaagacggagcccgaagggcggaagcttaagaggagggggcagtgtcaaccacgttggatagcgaggaggaacgggtcatcgaagcggggaaagaggaatggagacaaagaaccggtagcagcgtcctcgacatgcggatattatcgagtccgaatgagcgtcatgagtggagaagatctgggagaagaaaggaaagaagagaagaatggaggatgggagttgagcgggcggagagcagatgagagagtaacctccgcggcacctgactatcttgaactctttccaaatgcaaattctattatatcaaaagttacagctattttcctactcttctgaatttagatcgtttaggggtcttttacggagtaggtatcaattcattgagcactgttggctccacctacattaaaacgggggtagatggacgatcggttgatctacatcgtacacgttcccttttcttgctttcttccctttctctctcgactccatactatttgattcagtgatacattctttggttcagattctaacatcggatcccaaagaaagtaggtactacctttcagagctgatttgcaatatacttcttcgatccgtgacacagcatgtacctcgagggctgaaaatctcacctctctcgtgccgattatattcatctttgactgagattgaaaagcctagattgacacgggaaaggttgaaagcatttgagaaaagcacatcggccactgcaaagccgtttggtatctctttatctgtaatataaactagacggggtcatctctgagattcgataggatgccgtgtgacttgattcaattccccgtagaccgaggacagtagctggatatgccatgcaaatgttcgcacaagccaggccagaacacaaagcaatcccgaccagtaagaaacttgagtacatatgattatggtattggaatcaacctatcaaacgcaaaatgtcaggtccattcaaacagagctgaacggtattttcaacataagagactaggaagagaccaatgagacatagatggaataaactctgaagaaactctgcagaaactcttggggaaatcacaatcagatgggaaatgctctgcataaaaccgaaaagatccacgatgaccgtatccccaagtcccaaaccgaaagagaaaaaaaaaggtatgagaacgggaaactccgcgctgaagaatgtaaacggcaccaacaactttaacttagaatgagagaaagaaaggagaagacaagaggttgacgaatccgtatacgccaggatatatgtagggcaagagttggtgggacgtatgttcatcaagtcccgggaaaatgtgcatcaagagttcatcacagtgtgtgctacatggaccgcatcaatttaagcctcaacataattgctgcgaatgaattagccattaattctagaaagtgaaaggaaaaagttcttaccttgggaagatgcccacgcgatcaccaatgcgaccagtccaccagtcttctgccttctccgtccgcttgattatggtaataatttcacccttcttgaatccaaggtcaccctcctgatccgcatcgaatgtgaaaagggcaacggcttggtctgaccgcaattgggctgcaccagtcctttgctggaagatcggtttaggagcagttggacgggaaggtctgcgatccgaataggtatattcctcttcagatggcgcggtgttgctccggttgcgcccatagccatcaaatgaattgtcagcagcggcccgagctgtcacggaacgagaaagccccgaggcaggccgatcatagacatcatcagcccaggtattcgcgcgacgcggcctatcactgtagctgtaatcattttcactggtgttggaccgaccacgctgggtaccttgaccgtaggcatcgcccctgcgtccctcccagaccacgtcgtcatggctgtcgtcatagacaggaatgtcattgtacatggaatcaccgtaggcccgcgcatttccttggaatgcacgggagttcagcacgcgcatcagagcatcggcggccggtgggggacgaatgctgcctgtgagaagttggctagcggagacacgactgcggtacaatttctcgttcgcatccttgcgttccaccagcatactaccttccagactgacaccagcgaaaagacctttggtttttgagtaggagaagacggccgcaacacccttcgtactggctgcgccagccgcctcggcatttcggccaatcggtccagcagcgagtgatacattgccacccagcgtcagcgttcccacttgcgagaatgtgcgaacagcagcggcatcgttgagaatgaaaacaaagtcggtcaactcaaacccgatctgtcctccaattccggcacctgcagtcgcaatagccgatggagccgaccaggagccatcgccaagacgagcgacaacgataccggagccgaatcgaccagagcctaggaaaccggccttcaaaaccgtgagaatagcgagaccctacggggaaagatttgttagtcacggatgttcccaaccggggcattatgaatgtcttacctttgcattggccaaaatctccggtggaatgactttgtcgggaccgaatgcttgcctaggatcaacgaacgatgtcaagatctttgcagcctttttgcactcgcctggtgagagagaatccactgtcagccggatatgccgcgcacgactgcggggaagtgggctttgagtatcgatgaaacctactggtcatagacgccggcagcggattatggatgccgaaacccattttggctggtgactatcgaggtagaatcgaaaatacgacttgggagggaggaatgggggggaatgctattgatgtctcgagggcaacggttagtcagtgtgggcctgcccagctgatgacggctaacgcaggacgctggttcgtgggaagccaacgtaccagaacgccgagactggatcagatacatatgttgtatgcactaggtattatacaatgttggagatgctttgtgaattggagagcaaacaccacatgatatcccacgggcaattatgggctgaaacgagcatcgtttgtggcaaattggggttttattcacaatgtatcaggaagaaaagaagaacgacccagagatattttagccaaagcgacagtttcccgatgggtagagaaacatgtaactatagccgctgtataactcttgtataaatcgtaagcatacttgcggatgcccaggcgccaaggccattatcgtatcgcgattgtcccgaggccgaccttggaacttatccatctccatacacttcttcaattaagcataaggtcatggttggattatgataaatacgtgactcgctagacgcgaaaatggcatcaggtatgttggatatcccacacctagaaacactgctgacaggccaactcacccagttcgcatttgcgtttgcggcgatgagggcactggcaagtccagccttatcacttcgctcgtcaaaggcgtgtttgttacaaacaaaattcaaccggtcctcccccaaatcaccatccctcctaccctcgggacccccgaaaatgttacgaccacgaccgtcgtcgacacctcggcccttccccaggaacggaacaatctcgcgcgagaaatacggaaatgtaacgtgattcttctggtatattccgaccactatagctatgagcgagtcgctctgttctggttgccctatttccggtcgttgggtgtcaatgtcccggttgtcctgtgtgccaacaaggccgacctggcgactggtcatagtgaaacgcgagtggttgaggaggagatgcttcctttgatggcagagtttaaggaaatcgactcatgtatacgtacgagtgcccgggagcatcgtaatgtcaacgaagcgttcttcgtttgccaaaaggctgtcacgcacccgatcgcgccgctgttcgattcgaaggaggcggctctgaagcccgctgcagtagcagctctacaaaggatattctatctctccgacaaagatcgcgatggatatctatcagacaaggagctccaggattttcaaacccgctgctttaacaaaccattgaacgaagcggatctcaatcatatcaaggacaccattcagaaagcctatcctgactcagttacggagtccggcattgactgccaagggtttattcatctgaacaaattgtactcggagaaagggcgacatgaaacagtttggatcatcttgcgagcgttccagtacacggacaatctctccttgcaggagaaattcttgcatccaaagttcgaagtaccgccgttcgcctctgccgaactctcgcccgaaggatatcgattctttgtgaacctctttcttttatccgataaggacaatgacgggggcttgaatgaggctgaacttgcatccttgtttgcccccaccccgggcttgcccgcatcatgggccgacggttcgttcccatcctctacagtccgcaatgaagcaggacatgtaacactgcaaggctggcttgctcagtggagcatgactactttcctgtctcctaaaactaccctcgaatacttggcatacctgggctttgagccctccgaccaaagtgatcagtctattactgcagcgttgaaggtcacacggccacgaagaaaacgtcgccgccccggccgtgttggacgaaacgttgtccaatgccacgttctgggagcccctggatccggaaaatcggccttgctcgatgcacttctttcccgtggattcagcacgacctaccaccctaccatccagccacgtaccgcagtgaatacagtggagcttccgggcgggaaacagtgctacctgattttggatgaactaggtgagctcgagcctgctttgctggagaaccagaccaaactgctggaccagtgtgacgtgattgcgtacacgtatgattcctcggacccggactcattttcgtacattcctgcattgttggcgaaatatccccatctggaagagctcccgagtgtgttcattgcgctcaaggccgatctggatcggaccacccagcgagccgagcaccaacctcatgaatacacagctatgctaaacatgcctagtccaccgctccatgtgagtgttacgtggaattctatccaggaggtgtttgtccatattgccgaggctgccatggagcctagcaccgctttcccgcgtagtgaagaggatgtggagggcaaatggatgtcttggggaatcgccctcggggcggtggtttgtgccggtgccgccgcggtgatgatctggcgccgagttggtagcggaaattagggtcttcgttcatattctataccccatagttcaatgtgcaaataaatgtataaggatctcaagagttagttagttaactagttatgtacctcaattgactataatacttagtcaggcacatggccggctcagccggagttaagccggtccccgccaggcacgcggtctcttctccgctcgaacgtttaccccagacatcatttcccttgctgatcctcccctctcgcgcctcaacttgtatttttgaaatctccaaacctccgaacatcgagcctaatctcagtatacacatctgatcgagtgcatatatacatttgtgattgtcggacctattgcgcacccatatcgcgcccccccccccccccccccccccnnnnnnnnnnnnnnnnnnnnnnnnnnnnnnnnnnnnnnnnnnnnnnnnnnnnnnnnnnnnnnnnnnnnnnnnnnnnnnnnnnnnnnnnnnnnnnnnnnnnnnnnnnnnnnnnnnnnnnnnnnnnnnnnnnnnnnnnnnnnnnnnnnnnnnnnnnnnnnnnnnnnnnnnnnnnnnnnnnnnnnnnnnnnnnnnnnnnnnnnnnnnnnnnnnnnnnnnnnnnnnnnnnnnnnnnnnnnnnnnnnnnnnnnnnnnnnnnnnnnnnnnnnnnnnnnnnnnnnnnnnnnnnnnnnnnnnnnnnnnnnnnnnnnnnnnnnnnnnnnnnnnnnnnnnnnnnnnnnnnnnnnnnnnnnnnnnnnnnnnnnnnnnnnnnnnggcgccccccccccccctgccatattctgaaacctgtccatcgcttcccaacacataagagcttgcagatataagatcaaaagaggaaagtctgaataaagtacatcgcagacctggcatcttttttgcacttgccttatcgggtccaaggttgctctgtttgtcacaccagatctcagcccgagttcaaattgcgcctgtaccctgtacgagtgacgactaatcatgttgtaagcacgcttgttctttcctttcctacttctcccaatctgctactttcactctacaagctcagccctgtgcccttactattatcaacgtaattcgagagaattgcatatctcttgaggcaccagataaccacaacacttgctgacaccagcaacagcgtgcttccccctcctcctccacgctataccatccctgtcgcctatgcggcgggggcggcaaatggtatggcggtccctgttctggaaatgaataatactattacccacccggagcgtggctgtccactgcaagttggcgagggtatgtgcgctccacgatcgctggtgtttcctaaatgtcctgcttccttcagaatatcagagatgtcttacattttatattgcgacaggaacctacacccttcaggatgatttactcctcgcaacaccgcctccccacccgtctgaagctcctatcatcaacccaaaccctcttgcaactctacccacaccccctaccactggcgtaaagctatctcttgttaccctcgaccctcgaaagaagcctccgactttcttgaagtcaggtatcacagttccccaatttggagatgaaaacccggcgcttgcggcgccaccggtggcagcgaaagacgcagcgaagcgaaggaagcccaagaacaacatcatcaagagcagttcttccttcgtttcgcgagtcattacacacgagacatctgccaagcgattgagcgaccgtgacccgaacggtgtgtttgcctttgcgaatatcaaccgagcattccaatggctcgacctcagttcgcctacgaaagaggagcatctcaccaaagttctcttcacgaaggcgcatatgctctgtcacgacatcaacgaactcacgaagacgtcatcacatttggacattgtgatgggatcctcggcgggcgacatcatttggtatgagcccatgtcgcagaagtacgctcggatcaacaagaatggtgtggtcaataactcacccgtcacccacataaaatggcttcctgggtctgagaacctgttcttagcgtcgcacgctaacggtgtgctggttgtgtacgacaaagagaaggaggatgcccttttcactcccgaggtgaacgaccattccgaacaagaaattggacgattgccattggacatccttaaatctgtgaactccaagaaccagaagaccaatccggtctccttttggaaaatggcaaaccagaaagtttcaagcttctccttttcccctgatcaaaggcatctggccgtggttctcgaagatgggtcgctacgactgatggatttcttgaaagaggagtatgtttgtcctatgttaagaggaccgaacgattactaaataacgcttctagggtactggatatattccgcagctactatggcggcctgatctgtgtctgctggtcgccggatggcaaatacatcgtaaccggaggccaggatgatttactgacgatttggtccttccccgagcgcaaggttgttgctagatgccaaggacacaactcctgggtttcgtgggttgcattcgacccttggcgttgtgaccagaagacataccggttcggcagcgtcggtgacgactgccgcctcctcttgtgggacttcagcgttggaatgctccaccgtccccgggcacaccatgcctcaagtagaaatcgatccagcattgtagtgccaaattctcaaattgctaatcgccaccgtgcagacagcggcgacaaccgtgtgcgttcggactcaaatgaaaccgacaagttcaatgaagatctcgatcagacgacgagtcatcccgtggaacccaagtctcgcacagcgcttttgcccccgattatggtaagcatttattgacagccaaattgcctgcttcagaagactaactgatccgtagtccaaaatcgtcggcgaagatcctatctgctggcttggcttccagaaagactgcatcatgacttcgtctcttgaaggtgtgtataatgaggttggttggggctaattaatactgacattttgacacaggccatattcgcacttgggatcgacccagcgacagcgtcatcaaatcatgatgctccatttgggatttacagtcttggaagccttgggggttaccaatcgagatttcagtcttttagcgtcgcgttttctactcctaacacatgatatttttttatgtcgatattaccttaccaatctaaatctgtacatactgattgtgtgtaagggctgttctatatgtcatcctagaaaccaagcgacggcacacttaactcgaggttctcgggtttcacctcggttttcactactaacaccgtgagctacccatctatttttctttcctatctggcaacagaattaatgagaatagagtaatggttaactcaaagatttgactgatagtataactccaaaattatgaaacaggcatagcatcatcgcatttctcattaatggaagggacataatcatccataggtccatagaccaaatcatcaacatcaacatcaacatcatcaagcaaaataaatgtttcctagtcaactagcccaaatttcacaatagtagactttatccaaaaagactaccccaaataccccagaactatctccaactcatatatataagttcccggatacccagctggccagtttggatgaaggatgaccgacatcggtgatttaaaggaccagcgcaaacagacccagaagcagactgccagaagggggcatgaggacggcggcagcgttcgaggtggtacttgccgactccgtagcagtcgatgttgtggtcgaagtagtcttgtgagtggtggtcgaagtagtgctcgaatgggttgcggtggacagactactcgaggtgatggttgaagatgaggtccattctatggataagtcagtccctgtttctttcatgtagtgggtaaaaacaaaatgctgtctcggaagctacgctttccgcctttactaaccaggggtagtggatgtgtgggtagaaagatatgtggtagatgagatagtgcttgatgtgatgaaagtcgaggtaggaagatgtgtggatgtagtaggtgggatagacgacgtggtaatggaaatagaagtagtcggggtagtaaaggtagatataatggaggatggagttggtgtaatagaagaagaagttgcaattgtagaaatagaagtaactgaggaaggagtgagggtggtaagcatcaaagtagtagtcaaggtctcggtgtaagaagttgtaactgtcaaagtagagggtgttgaggggaaataagagggcccttcaggggtggaagtataggttgaagtaatagaagaataaacgaaagaggtagacgcacttgcagaagagctagttataaaagaagatgttgtaggggtagaaatagaagatgaagcagtagagtaataggacgaggtagggctagacgcactgatggaggtgtgagtagcagtcgaagacaggtaagaggaagtagtcgaggaagaaagagtcgaagaagtaagatcactggtccacgcggtggaagaaatcaaggacgaggcagacgaagtttcaagcgcagtactggtttccttaccagagctactagcactactagcgatttcaccaggctcagtgactaggaattgctgagactgagccagaatgccgctagtcggagagaggaagttgatctgatatcccttcctaaattgctcatcagtcagtaattcaaatagaatgcaatgaaattgaacttacccatcatctacatccgcgaacgtttttgctttgacagtgtaggagcccttggaagagtctacatcatctgccacaattgtcgttgtcggagggtagacattctgattgaccagttcgatggtaaaggtttgcggatccgttctattaatattgtatttctggttagcaaattgccagtgttcataaagcactgggataactagcagcttacgagacggactgccacttgatagtaagaggcaggtcggggtcaatcttctcaccaatccggggggaagtgacagtgagacctgattcaacggttactatattgattgtattcccgcggacgatatttcatacctgcagctgtagcagccagaaccgccaggcagataatattcatccgcatattgattggcttcaataatatccaatatggggtgaagtattccaaggaaatagttgtcaatcttggaaggtcgggccgaaatataatattcgtgaggttggaggaagtcaaagccagtggcgatataagacgggaacatggtactttatagccccaatgacaatgacggtggtagggggctgtatctctcacggggtcttctcaaatttgaatggcaatctttatttttggactgatttgccgtgatgccttgatccatcacgcatcgtgctcccaggtgtgtgtcagagtacagaatagttaggtgacgaccacactttcttgtccccgtggtgtgaatctactagtgcgttgcagtcaaatggatcttgaggatcaaatgtgcattctgtagcttgcaacttcattttcagcccatatgagaatttttcgtcgactcaatccatgatgtacaacgtctggaattttgaccggccgcgcgtcatagtttttgtccgtatcgcaatggaaagatagatttcgtaatacattacttgttcatataactacttaacgcagccatagtcattggctagggcacgggacccctaggatgactgctgcggcctgtttagattcgataccgaatggcagggattcatgggataattgctcttttcaaacgtcttgagtgccgataatgcactagaaggtcttttagctataaaatgccctgggagattgtatgtatcaaatatcttagatcgattgagcttacatggaactatatattcagacctgtcaacacataccgaaagcttattcgagggcaccactttatggtcattgagtcttattaaatcgacaacttattagacgtgggacaacaactccgaaaggtctagctacatcgaaagtattgtgttctaggtactctcggtcgttatgagcgtaagtaggacaaaaagccaagggaatacgattttcaacctaactcccggctccacacacggaaatgagaagaagctggtaagcaattaactcctcattttgtttagatttactagtcagaaagcaatcccgcctccacagaggctttggtatttcaaaatggttgcctaggagaggtcttggagtacataagaagttgcacgaagcatgaacataaggtcggaacagtgcttattggacaactcttgggagatattaaaatagtccaaatggtatctaggttgcttgtcggaacgaattcttgtcttgactgtcgtaataaaaggtccccgttcaatcttgagtatctatctgtctgtgctctccgacacttccaccactgtcaggccaagctacgtttgggttcgcagtgcatcttgtataacctattgatctcaagagtctcagtctggtccttctagagttgagagttgtcgtcagcattctccaaagcctcagatatgacgtggaatgtccaaagggatctaaaagcattatcggtacggagtatagtcatggtaaatattagtcttacgaatggactatgaatcatcgagatttttattgtactcagtggatgatgcggaaagaagtctgcatacaatgaacatcaagacataatttcaagcattgtattgatcacctgtcacatctaagtaggtagcacgtagaatccacattctagatagtctaactaaagcggaaatttttcatgcacgataaatgcaccttacttttccacttcaatccggggaacctcaacgctcaaggacactgcgaccaccgtcgacagtgatcctattccgcactcgaatgcgagcgtacgctgttccgagctggacaacgcgatccgaagtaggctcatctttggcccgagtgctgtctgcagaggacgagccgtcttcactaactggccgataggaagaggtgacacttgaagcctcctcattctctttggcattgtgctttgcaatgtccaacagcgctgttggacagaataccagagcttcaccagtcggcaaacgaacaatcttgtgaaagatcgaggccgcggcgtttgcatcagatttctcaataccagctcccgcgatgtgtgactttattgccttgaaccaagctggcgatgagaagcgatggataatagtcacattgcacagctcgagaagtgacggtgaaagagtcggttcctgtgtagctatcaagacgcgggcggctagatgtcgctgctggcggacgatagatagcagtgtctccgtcagatctgcggcttctgtcgacgttgaggtcatgaactagaatcaaattaagtgtcagtataaaagataatagatgactcaggaaattaggaagggccacaaaccttgtgtgcttcatccagagcaatgatacgacctgtgtctcggcggttcttcaaaaacagggaaacggcgatgttgaagagagcgcatgcatcttcttgaccaacgaacgggcagctcaaatcaactattgtcaaactgcccggaggaaatttccagacatcatcaacatcgtgttgctttgacttgttgggacttgcaccaggcacagatccaggttcaaaaaatgactcgagcacctccaagcgcatattcaaaggcccgatttggcctttcaagaaagtttcacgttgcagaatatttctgaacgcactataattgaatccggatttcccctggttggctatagccatgtctcgaagaatcttcatcacaacctatgtgagtagcttattagtacgttttcagcttgaatgaaaggtgtgctgacatacctcaatgtaaagaggttgctcggctttgttgccgatgcccatcaaggtcttcatcatgccgatgttgagatccttttgtggcagatacaatggcttcaccgtcagcattttggaaccgcctgccagtgttttgtatgcctttttcatggcaaggtagttggtcggggagaccaaaacttggacaggaatgcctgaggagtagagataagctgcctcacacaactgcgtgctggaaaatgcagtgaaattgtcatagtgaatgactagtccagccagaggtgatgctagcttcccagctggggaggatgcaatcaatgcattttccagaaggcaggacagggtatgacttttaccacttccttgactcccacagatgaaggcagaccaaggcgctgacacgtttgcatacacaagatcatcttgtgtcggtttgttactggaccggttacgcagaccaagcagtccatactgtggaaatgtgtctctctcaagagcttgatcgctatacagacggtcggtgtccaggacctgacaagcagagagtgagaatagaggtgccgttatcagttcctcgtccaagcgggtgttttcgtatggcgatgttttcgaggaaccagtgtcccctttgacaagcttcatatgctcacctatctccaaggtattcatagaaagttggagagactccataatgtaagctcttgatggggatagtgggagctcgcggtggagacaagatgatgagggttgaacgagtcaaaaagaaggcaggaaacagttgaatttaaatcaaaattctagaataatctaatgtcaaacatcacagtaaacttctagaatgcctctgcgatatgtttgttccttctatcgctgtatggatttgcaggactgcattatcatgcaagtgggttactctactatttgcttcatatctccgatactctgatagtacaaggactcctatttcacccctggataggaaattgagcctaagggtataaattagaagcctcaagatgatcatcacggcccaggggtgttcccgaagccacaaaagcttggcagcggatgcatagaagaaaacttggacacgtgacatatacgtaagaagaccttgtgatttgatatgcttcgcttcgctccgcaatcatgttcaggggagacttcctcatcatttcaaaattgcgtgttctctctagatcattatggcaaatcagacgaacatgttccctgcaagtgcctctgacattttgtcgactcaaccacacgatggctggagaaagaatcgaagcacagagcttaccacggtatcatgaaaagcattactacccggtaaaaattggcgaggtgtttaaggaccagtaccgggttattgcaaagctaggatacggggcgtatcccactgtttggcttgcctgggatcagaggtttgcaaatcctacttatcctatctgtttctgaatactgagtattcacgcactctttagggcagagcagtatacctcactcaaagtatgtattagccaaggtaccgactcttccccgattcttaacgagatcaacatgctgcggcgcttgaagagattcgcggataccgatgaaggcgaccatcccagggtggggtttacgcgtcttgcagacgatatctttgaaaatgatcaagcgtccctacatggccgatactactgcatcgcttcaaaacccgaaggccagagtattcgcgtgttacaggaggcgtttccaaatagtatcctgcccaagcttctggtgaaatccatcatacactgcttgtggttttccgtcgactggcttcattcagtctgcggtgtcatacatactagtacgttcaaatgaggtagcggcaccttttgcatctcccacttactaaactgtgagcagatatttcacctcaaaatgttctgatgcaactcgatgatgatagctgcctcaaggacatcgagagccaagagtcacaggatcctagcgtccctataatgacgactgatggagcggctcccgtatacaggtctcgacgagctaagatgatggagcttttaggtgacccgattcttattgattttgggcaaatgcggctagcagaaggacagactaaccaggattggtggatgtctgatttgtataaagctccagaggtcctcttaggcctgccttgggagtatcctgttgatgtgttctctatcggtgtcatggtaagtactagtacacctaaactttgtgatactatgtctaactcaggtccaaaaccaatcagacacttgagctcacggaagggaagaacctattcgaccccattgaccgagtcaacaatcagtatgttcttccgttggcactggcccagtatatcggatatctgggtcctccaccactggagatgattcgcaagagtccactattttcagcatattttgatgaacagggtaagtctcccttgaaccctaggcttcacagttgagcttaccaaagcttttttataggcaactgggtgtcggagccccccatccccaaaactactttggaggaattcgtcactaccatcccaccaggagaggaaaaagaccggtttctccggttcatacgcaagatactaacgtgggatccggaagtgagggccgactcgtatgagctcatgcaagacgaatggatgatgaggcatgcttcagagcaagatctggtggaattgaagaaccagctgttttcataggatcagaatgggcgaacaatatacgtactgtttattaacagagcgcgttgaggattgctttttaataatatcctggctcaagaattggagcgcttacatgaaatctctacctagaagtagttaaatcataatcaagttttattataaaacaggaccgcccagcaatcagatgccgggtgttcaaaggcttgatttcattgctcagatgctttttctttggtttttttaacttatcatgtcctaattctgagatcttcatcttctaggtagaagatataaagaggaagaaatgacagaaaactggaaatatgcaaggcaaatatgaggttgatcaaatttttgtagagagaatgtgtcaacatggtctttcggtgtggcgcaaaacaaatgtaccagtctggtcaattattgagtcccagttcttccatagtcttctccaaggtcgtcttcatgaactccttcataaccaaatcttcaccacaaacggactcataaagaattttggaggtgatgttgacccccatattcatcaacttactgatgagtacgttctctctccgaaggactgcataccgcaggatggacccaatttgagtaatatcataaccagtgtcaatgatcaaatcaatcagcctcctatcaccaccaacgagcgcagcgtggagggtattggggatgaggttcgaccagcctgcggtggggatccctcgaactgtcactccgatcttgtgaccttggaccaatcttgatcgtgttttctcggggggatcgtctgggcgtagatctggagcgaaccgcaacacgaactcggaattttcgtcattcacatccgcaccctgtttgagtgcatacctgacaacacttactttgctgtgccagagtccctcgtacaggatgatctgggcagcatctttgacggtgagatttcgatcgccactcccaaggaaagagaacagcgccttgagcacgggtaaatgaccgcgagccgcagcaatcttcagaggtcgtcgcaacttgaaggcacccgtgaatgcgagagcatcgctggaaagtaacaactcaacgacattgacatggccatttcctgcagcctgtctcagtggagtttcgtaatgttcatccaacaagttgggattgacgcctttctcaaggaaaagattgacgcaagacagtgagccaaattcggctgctgcggtcaatgggtgtgatttggggtgccgtgggatgacactcaaagactcgggtgcgtcgcgatcgatcaaatgagacctgaatctatctcgccgtggaattttagcgccagccttcaggcacttgtgtatggtgccctccaggcctcgcttagctgcccataggataatatagctgtgttcctgtgctgagcagctcttgtatagtttctcgtcgaacatgagggcgaaacgcgggctcgtgcgaatcaaggcattgcggtctttctgggaatgcagattcttctcaatcatgagaatgagctctgtgggtagaatatcaagcgacatgatcgctgtcgccagaggcaatttcgaagtactgggtgctgaagatgtgacagtcgagggaaagagaatcgagatgaagggtttgtaacaaagatgaaagaaagattggctagaagaataaacaagttgccaagcagagaaaggaatccaagatgagatatgagcgggtgggagatgagcacttgaggttgaggaagagagaagaaagttgagtagatagggattttgagcagataaagtgcgagtgatagtaaagccacaatcacaaggaggaaaatcagatgaaggtggacaatgtatagcaattgaggcttgttgcgtacccaggtggccttgtttgtcaggcgtctcccactttctatacccaaggttgtccttgaggctgaattggccgtaacctacggtttacctagaatccaacttgtttatattattcctattaataaacaattgagcattggaaacatttgaatcaaagagatatgtgctatgagtcgaccttctaccttagtcctatgtaaatgaactacttctgttaccattagcaattcaataagaccttacctatataatatctatgggttaagccctcgactactttctaataccgtggattgttcgagaatgttattctctagcatataatccctcgccagagacctgatccgccagcgctattaatgcaatctccaaatcaccgggtccatcgacttcaacattcgtcctagcctgattataaggaaggtattggtgtgagttgtgaatgccacgagaagactgggtgttacgcagctctatcctgaggggacaaaaattgcattcgcctgagcagtcaatcctagccgtaaattcacactcgcctgttccagctctttgggtatattcacaacatcgcgggtcacaaagtcaccatgatagtcaatcaaggcggcttccaccattgaccgcagttcgggatctgcagtaacggcccaagctgccgagagacacattatcacgtatcctgctccaacaggtctgtaaacattggacttctgagcatgttcgagagtttccttaacaagagatttcgattctaccatgcatgtatagtcactgggatccaatgcctggagaatgcaattgaaaaatgtcgtgattgcgagaccaattccatgggtgcggagataatgtgctctcaagatacggcccatgaaggtttctgtcatagtgagcccggacttttcaaattcgactgttcgtacttgcaattcgcccaggatcaatttgcatttttcgtatattggtcggacttccatcgtcaatagcatcaaatcttcgccatcgcgtatagcttgtttgccgcgtctcattagaactggggctcgcgctagacatcgcaaaatctggccttcgggttgatcttgatcaaagtcatttttgactaaggaatcccactcctcggagctcaggtcgacagcatcattgtataagccctcgaataacttaggtatatgattagcttaggcaagaaatgtggtggagtcgtgtgtggcctaccacgcttccacgtaaagagaggaacaatttacgctcaaagtcatcgcgtggcccaaagttctttcgcgcgtgcagaatgctggcggccccttgcgcatgtcctgatatcatttgcccgttatttccgatgaatgtttggcagaccaaaagtatcatgacagcacatagtgtgctggaagcactcgcctggactgggtggtctagatagactctcagggtcttgagcgcatatgaatacttggctagtgtctcagccgaaaccgattgaccggtgcagaagcctgcgtgggcagtggttacagcgtcaactgcgtggtcgagtgcttcgttgctgccgagtcgtcggggtatatcttccaggaaagtgccgaaagcccaccacagattgtaccggaggtcagtggatcgttttatggcgccgacgaacgaattggtcaacgacatcatactattgccaggacatgcccggggtatttcaaaagaaaaaattactttttctgttgattttgatcttgatgtgagagtcatttgaccgcttcgatttgatttgggggaaaattgttgctctttgaacttgaatcgttgctgaccggaccccacacagctcactttcagacgaagacatcgtccacactcaggttgtttctcgtcacacttggcatattattaagattagcaacgtgtgatatagtcttatggcacgtacctttttcttctgcttgcgacacgcgtcacaggcccgacctgttgggacgcccggcatggtggggtgaagacctgagtggagaagcggagcgtggatctcaaagcaaacactggaggctttcagtagcgcgtctatattcagtgcggaatacgccgtagacagctacaaaatcataatatattgcactaaaaaaggctctaagcaactaggttgaggttattgcggctgcccagtctaaccgcttcgggtcaaatgtaccgctcctcaaggctgagttgtacgtcgctgattggccggtttattagctataataacaaggctgaattgctcggtctaacccgatatgaacctatagcgcttcacgcttcattttgtggagcatcgccatttagcccgccaaaagctacgctatgtgtccagatggtcttacggagcgcatgagtgagatatatatttgatcgtcatacctatcctcgtgacatccgatattgcacccttatttacagcttagcttgttcgagagggctcagctttctcaaaggaggccctcctctgcttccgtcacctgccatcggccccttcgagtcacctccctggggcgggttcatcctccacttttggcgcaaagcttcaggtgctttgttctcgaagcagtccgcgatatactggcccaggatagggaggaatttgaatccactaaaaccaggttagttaatataaagtcttactgtgcaaagtgatagttccatcaacacttactgtcctgcaccaccagtagccatgaataggccctggatggttgggtggtggtcaataataaagtcaccattaggggtatccgtgtaccagcacagtcgacggttcatccaagggcggtcccccagcttagggaagaactgacgcaatccctttcgcagcgattcatcggcatcgtcgggcagatatccagtggccgcattgctgctttcgagctttggcgatgagagtgacttctgaacaccgtccacattgacaacgatatcagttgcatatccgtaaccgtggcgtgccatcttgagaacatttgtgtctggtgtgggcgggaacgagaaaacaccagagctcatgttaatcatgaccgggatctttctcatctcgagagcctcctcctcggtcaactgaatgaaaccaacaggctggccagaggaagatgccacatgacccatgtttacaagacggttggtccacgctccggtgctcaagatcacctgtgaagcaagcaatacctggcctccaacaaggttgacaccaacaacgcgcgaccccaccctgcgcagggagacaacagtaccgcgaggcccggcaatgatggaaacgcccgcgacagtacacttggaagcaagcttctgaatactgcctgcggcatcagcccatccacctttcggattgtgatatccgttcatgccggaaaagtctgcttgaacactagggtaaagtttgcggatatccatggcgtcgtcgagatcgtctaatttgccacctgccgcccgaatgatagtcttagatttctctatatatgcattcttgggcgtttccgaaaacatggcgaatcccgattcaaagtattgatctttgtactcggtggtccatccattgtatgcttcccgggccattcgagagtagattgggtcggcatagtcagcgcgaataatgcgcgagatgtcaacgctgcttccatctgctgatggtggtacaaatcgatcgacgacggtgatatccgtatatccgcgcttgttgagttcaagagcggtcgaaagaccgaagacgccggcgcccacgatcacaatggagtctgtcttagctgtagtcattttgaagaacagattgacagccagagggattttgtcaaattgcaatcggttggaggatttcccaggattataaaatgcagagggtgtcggtaaggaaagccggttcagtaccgtcttggcgtccggcaaagtcggatccggtccgtgttccccggatcggaggtagatatgcatagaatgtttacattctaaactcacgttgggttaacgcttagccaatcctcaaacgccctcccataatcttgaagctgcaggaacaaggtatcaccgccgctatcaccgccgctaaagtccatattgggatctcccggaagcccggaaaagtccatcctcggtgaggtctgactcggcgtttgtataggatcttcagtctgttcaggtgggtaggtgacgcactcgggagccactgtcttgtgacctgatatcccagcagatccaatcaaagcaaaatcacgttcggtgatagcgccagccgaaggatccccggagcatccgacactgtctttggcaagttccgggccaaagatgtcactagcaggatctgatatattgctcgcatgggcatatactaaaattttccataataattgcaagttcacagaccacttctgacgggagttggttcctgctggggcggtgttgtctgtcataaggcctccaggggaaacgctgtcccggagttgttggagttgtcggacctagaagtgacatcaggacaggtgtgccaaagaaacagcttggaaaaagaactaacctgtcgatcaatgtgtggccaccgacaacccatattgcgtaggaatctaaggcatttctcaaatcccgtttgcgcctttctcttaaaagcttcatcctcgacaaaactatgttgaagatagatcgtagcgacaattgccacacattgccctaaagtcgggtcagatacctcgaagcttttggcctcgataagctcaagaaaatgaatgacccagcccgagtggaaggtcagctgctcgaaagaattccggaggaatgactgaggcattgtcctccggaagttccgaagtcgcatagataaaagaaacggatggtttactaaacaaggcaccgcgtgccaaaccaactggaagaatagccatgggctccaatagtcacgatgagcctgaagttcggcggggggatggtcttggaaccgacttgcatgaagtcggaacctaagtggcatgagactctcatgctcacagtgtcggaaatttagcatggcgtactcagaatttggagaccatgggggatgagcgtcaacgcctacatggcttgcggcataaatacatgccatcgcccacagctcgcttgtgtaaacactgctaccattgatgccaatatctggcttggagtcacagctggtaccataggcgatctctttgttgaaaatcatggttgccaatggagagacggtttgaccaggctctgcaagtaagtccaagctgtctccaggtggatgtagggacccctggaggttcctaagcatgacaatacttacatggcagagcttccgctcatcgcgctcagtttccaaattgcttagagactccaggccatttattctgaggtttctcatcaaatatgtggcaagtgtggtataagaccccgcgcgaatgatatgacccgctgaacagatggaatacaatgttaggaatagacacaagggcacgggccgggattgctttacctgtgaactccagcatacttagaaggcatagggtctggatagtagatagctccacagtacctgatgccaaacgcatcatgaccatctgagaggccctttctgtttttattttgatctccagttgtatatcctggtcaatgatccctggtcttttgaaacggactccaagagcttcaattgcgagtagaagctcggggtcccgcttccccagggagactagagaagatctgtgggggaataacagaaggggctgtgcgttacaaaaggtcagataaagttcagcatctgggatcgcaggtgatccagctctatttcatttgttaatgaatgtctcctgcgagtatatcccaagttgaactcacatagaaaagcttgccgggggtggaagctctggtatctgagggttattctcgggaacaactggcgaagggaggtgatttgaggcaggtcgcctacgagttcaatcagccaaatggaacgaaacagcacggaaatcagaactgacgtgatatattccaccaactgttccagtttcccctcaatgccggaaatgcgttgctcctatgccacattagaatttgcttaggtctggacatcaatgctacttaccatcatcttctgcgagtgcaccaggccttcatctacaatctcagcgcctgcatatacgcattgttgacccagtcgctcgcagtacgagcaaatcggtttctcccctgggcaacgcgactttttccggctgcgggaatgtcagctccaattggctctcagcttaggacacctgaggttcaagctcaccgacatggctcacaagcctgacggactcgttttgatggtctttcatcttcaattgaggccattttgcaaatcatgataaaaaaaaagtttgacctgaactgttccacgcgggtaaaacgacgatccaaggcggggaacggctgtgggtccgaaaacgatacatatcaagtacaatatagcctccccagcttctcatctatattcctctatctacgctcgatgggctttgactgtgagaagaagaacagaaacaacacccgagggcacaattcagtgaaagacgtgtgggtttggttgagacatcttcgggcactgtcacaataatcccaaatgggtttcaaaagcgccaaacttgggtgtttattctacactcattcgagagatggtcgcagatatcagcatgatatccaattgcaagatcactttcctcttgatcatgagctatcgctatccgcccatcatgaaactcgaagttgcgtacaaagtggacccgtattatagatcatgcgcgaatgtgtactccgtacacggcgtgctatacatagcactgggatgtatatctgtgacctaaacagtgtgagactgttcaactctgcctctcaaagataatataaatgcaaagtcgtaatttccacatagtgaagatctacgatcatgtgatctgatctgccactaggctgacgtcggctccgattccccaggcttttggccactcctcctcatttcactgacaattctcccagtctcggcgcgctttgcattatttcgaataagcatccttcaagattgagggaaacttgaaagtatcaaaaatgagtgacgcctacgaacgcgagcagtatgtccccctttctccaccttgtcccatcggatgtcgctatgaaaggagttatgcatcgatttgaatgctgattttgaaacaggcagaataatgcgctcctcaattccctctcctcgaaggtctcagctctccggtcggtgacgattgatatccatgataatgcgcgggatcaggacactctcgaccatacggtatgtcttgatcaatctttcgctagtccgataataattgagggcatgtgtttgctacttgcagatacctttgactggcgcctcggtcgggttaacttgcgactgacaatcttaccttcttagaccgatgtcttctcctccttctcgacgaacctcaaaggtagcgctactcgactcacgcggatggcaaagcaaggcgattctgtggccgtgttgaagattgcgggcatgtgtattgctgcgggtgtcgttctctatatcattcttggatggatcttttgaaggattcttacgtctttcgaacctgcttctccctcgtcaccctttacccatgtccccctcgatactcgacacccttgctggaacgagactcgtatcgaaaatacataatccgatgctatcatgttattccatcgtgctgggctgtcttcgtcttaccgaccgcatatgtgtttgactcgatttcaacatgacatggcaccttggtttgcagtgtatgctgtgccccaggatttccccgtcgttctcgatatactcgtcgttctattttcgggctgtgcctgttatagacattgttcctaagagcgtcggccacgcgactcccaccgcctcctttgacccactctggtcagccctgaacccctaggttctcttgattgacgtcttatgatttgcaaattggcccaagacttctggttctggtctcttccttggagcagccgactctaagtctcattgcgacttgacattttcgcttcttcccacctttccatgtcattaatactgtgattactcgtgaacataatacatacttggagccagtctcgctggatctgctcagccatgctctactatctcgttgcgtaattgaagcgcaccatggatcagctggatatatatactaggtggtaaatgcaatccagtggcacatgttgacatcaccaccaagtggtccattaccccagcttaatatatttagatcaacgcctagatctctacttaaaaaaactctaatcgacgatcgtgagcttgagctcatctgcaccacggtcgaccgacaacactaaccaaaaacggaaaccaggtagtatagacctcggatacaatgagaggccaattcggatttttcctactccggtcttcttgacattagttacatgtagcagtttactatcaaatgaagtgcatttataatgttgaacacttgctctattgtgtcgtgtgccacatttccacgtgtcaatatcacagggccgttttcggccaacatgtcttggaatgccaacgtaagttccggtaaccaatctcatcaaatagtatcagacttgcagtttattcgcaatcggtcaaggccacttgcctcattggaccccattgtttccatggccacgacccgatacagagggtgtcatgccatcacggcagcaaccgtcaccctcggtaaatcggttctcattaaacagtcagtaaacttagccgttgttaactagtgcagatactaagaagggaacattcttcacgggaacctgccactggtaccatagtactctcgattggaacattatcggcaccaacagaagctacctctagctgtgaactcattcatcgagatccgggagccggtctctggtggacaataaggtaaccttcgatgcaatgtatagccaagctgcacttccatgtgtccggcctgcgcttatatccttgttgccgaggtagcattgggattctgaattcgaagccggctgtgatggatagccgaggagtacatacccatgacggtattcaaagcctaagcgaaacagaaaccagctctcgttttcagcagccgggtgtagtcgtctccctagcttacattagccctcgtgggtaggtagctgcgacatactccgtagccgatgatatgaagtcgtcgggcgttctcgggtatgctttgacaagatcttccaggtttgacttgcaattgcacatgttctgtctttggggatgatggatgtttagaatatgagaggattgaaaaagcctcggctctgttgacatgaagtccgatctatatgttgtatatgatgtgcatcacacgccagatctagaccacgggaacccccgaaccaaaaaggcccgaagaagaccctgattgcaccgctatgtgaataaattccgctgtacaattggcccaaccgaggccctcgtaagccgtaaaaagtcttttccggatcttggcaggcggtcgatccacgcgatctcttttagttcccgctctagacattgcaacctcccctggcgatcactggaagatagctggtcatactctactttgtattcggcatgagaactacgcaaaaaagatatatagcacttgttctgctgcgcgtggatgcatgtaataagtacttttagtatgccctgtttatcaggtttcatagccgtgttttcttgtgttttgtgttgtttctttcggttttatttggtgggtcagatctcttacgatgtctggctttagcaaatactattggtacaccaagacgcaaagaccccttgacgtgcttcttatctagccaatcttgaaaaacattaaccgaagtgataagctaagcccccagggtcgaatgaggcgtttactgatgttctgtaattggcttaacttgctcttggacgttgaacatggaaaatggcctgatgcaaatcatcggaatacatttagggttcaagcttttacatgcaatgctagccgtatatgttgtacagtgcgttgagcggtgtaacatgcctagtttaagattccgacagtgaatcactcacgatgacgacatgccttcaataattacaccgatgtctactccgtacctgggtatgtacttccaaggttatctgcatttacaacatacgcgtaaacaacgagtcccacattattgacttttcttcggcatgatgcaatccaagtggacgttctggaactcaccgaagataatttcacagtggagagtctgtaaaaactcaccgtcgatgatctgcttggtggggccgtaagaaaatctttgaaagttggtagagtatagctctgaccctagtcatgttgagtgctttatagacttcgaccgtcctagccgagacctcgtgatggtgtctttagccaaaatgaatctaggctttcagggctggatcaaaagattagattagagcgggtcgcacgccataggaacgggtcttgtccagttggtatcaaaaggaaaaaaaaagataaaaataaaagtcaaaaacaaagtttcagcctaaatcctcacaccgagaagcccagtataaacacggcgaataacagcgcatatactcggggagcttaaatcggcacgcaatcgggattccgatccggtgaagcggaaattcccgagttccatatgtggaaggcatcccgatcccagggctaggcctgcagtcggcttgtacgatcgggagcaggccgagtgctggctttcatgcactgcactttgtatgtgtatgtacgtatggagtatatacatgttacatgaaacacgaccgcagaagtgggtcacataaggcaccataatcaacagtttgtgtgttgtttgtccgagatcttatctatgtttggttttacccttccaaggttaggtgaaatccctcacaatatatctgacccgctttgaacctatcacgacgccacgggccttgacagctaggcggggtctggttagtataggcggttcccgctcttaccgcaatgctcatcagggactctacaatatagtgatgtaagtgttgggttacagtaggcggttggatcacagatatttccgattattgccggtgagattaagataggtcaagcttagcaggtcaaagtcaaaggtggcttcatgcatcaatgtgcattggggattttcaggcacggtaactacagcttacaggaagagacgatcgcatttgaaactgtatttgtcagtgtataacttatctgagcaatatcggagtggcggcagttcaatgaattgagaaagaccaagggtccaagcccaaggcatattttttaacgagtggcgcgatcgagaccctagtagacaaggattatgtgtaccgtgactggttaaatgcagccttgctaactagtatactttgtagatctcctatttaccatcaccaaagtggattttttagttgacgatcaggttctgaagtatgaaataacgctgttgtgtgactccatgggcatacataggtacgttgacgtgtgcatcttcagggatcttgaaaccatgcgggaagggcgatcccgaggtatgtacggagtatgccgtacaacatcacatggcatgatggataagcgtatgggtaaaccctagacgctatagttagaccggggtgagttgttgaatggtttcggatgtccttcgtccatgtcatattatttggattttgttctggatacagaatcccttgcatttgaaagtaaagagactaaataggcatcaaatagtaaccacgcgtacgtactttgtaccttgtagggagtaactatgtagggtctggtatgatagcgctgacgtaaaaaaactagacactgatgggttttgatgtgcttaaccggttaagatggttctaaggttcttcacaaatctcacaaatcctttaaaatcctctaaatcccacttttgctccaattcttatatttctcttcattatatgccaagccagccttacatcgcgcatccgtgagcctatttccatttgagattagtcatttcgcatctcggcactgctaaaggccccaaaaagaataaaaaggaaaaaaagaaaagaagaaaagaataggtcgccggaacggcacaactccactggggacccgtgagtcggaccagtcttgcgtatctggccatgttccggtagatcagtgatagagaaaaaacggaaaaaataccggtgccatacgccagtacgcagtaacgcagtacggacggagtacacttactagccttgatctctttactcttgcctcttctccttcttcatatttttattccctaacttcgtcgacatctccgcccattgctgcgggcaatttccaaatggctctcagcttctttagtagtggcgggagcgccagcagcgccaagtacttcgacatcaggtgagtgggggaccggatagcccaggcgagcgacatatctgacttctacaggttgaatgatgagtatatcgtgttccgtggcggcgaacatgaagccgccagtgcgcatctgcggggcactctggtcctgtgtttgtccgagccgctcaccattaaacacctccggctacagctgacgggcatgtcgcgagtttggtatgtgtcgcattcctaattctgaatcaacaccactaacaagccatttgcgcagctggcacctcccctccagcgcagccgccggtggccgaaagtcatggcgtgaacgtgtgttctatgagaaaacgtggaaattccgggacctacccaaaggaaaaaccgaggtcctccctgctggcaactatgagtacccctttgatgtggtacttgagggatccatgcccgagagtgtggaaggccttgccgagacatgggtgatgtaccgcttcaaggccgagatcgggcgcaagtacgtcaaggacattgttgcgcgcaaaccgctcaggatcatacgaaccctggatcctagtgctctggagctatcacatgcaatggtaagtggtcatatcggcctgactgtcagattcttactgacaatcctcccagtccgtggacaacatctggcctaacaagattgaatactccatcagtaccccgacgaaagccatcgtgttcggaaccgctatccacgtcgatttcaaattgattccccttctcaagggtcttcggatcggccaaattacgtcacagctgatcgaaagccacgacctcaccctcaatccggaagaccccgattccattcgcaacacatacaagaccacaaggacaatcttgagcgacgagcatgagctggatgagaataacattgagatcatcgatgaagcggcggaaggataccaatgcaagcgtatcctagacatgccgcagacattgacccgctgtctgcaggatacagacaccaaggggattaaagtccgccacaagctgaagttccggattcagctgcacaaccccgacggccacatcagcgaggcgagtaatagtagaatccctggccattcttctgacaggctaacatctcaatgcagctccgggctacgcttccagtttcgattttcatctcgccacaccttgccatcgacgacaacaacaaccttcttgggcaaacccctcaatctacccggatcgccgtcgatgagtttgcgcaccaggcgcctcccctttacggtgagcacacatttgatcagctgtatagcgagctggatcccagcggctatcgcacaccaggccctgccagtagtccgggcacgcctttcactcctctcagtcgcaacatatccacagagaacctcgcctccatgaacgccctgaccaacaccgatatctcagcttcggcactgcaccatcgtctcacaaacctgaacgcaagtccgctccaccatcctatcactcccggtgcagtcactcctggcgagggcctgcatggatctcaatccccaacagacggaatcccaattaatcgccaattgggtgtctctaatgactacttcggaacggcttccggatcgaaccatggcagtccagaactctctcgtcggccatccgacgaagtggagcccgaagcccttccctcgggcatggcaactcccttccacccccagtacgacgaggtagagactctcagtcgggttcccagctattcgactgcagtgcgctgcgccgtgcgtccccgtgactctggtctccccgattacaatgccgtgattgctagtagcctccccacgctaccagtcccacagtctccccaacaggctcatatccgcagcggccgtgcaaccggaccgggaactcccctagaggtgcagaatcgctccggttacttcaattctcgcggcaccaatgctgacgatgaggaacgcagacttagaattgcgcaagctcgcgccagagcatgagatgtggccacggaatccttcgatccacccatgatctcccgccttcactttccatcaaaagttctccttctgcatcggtgctggacactgagacccacgcgaagcgctctatcccttaacccttagccattttctctcttcatcttctccccccatcatgttctttttctacaagcgatcatggtccccagcattagctccccttttcaagcctcagtcccagtcaatcgggcacttctcatccagcattgttctgaatgtttctaccgtccatcagcggcaacttcccatctcttcttacttctcattgccttttctcccaacatctcctttcctctggcgttcgatcatagacgggcaggaatactttcatagacggtcacgggtgttttgatctttctttcacttttttttttaccttacgaatgagatccgatatgaacgagctgcatgacatttaaatatgcctatcagcacgagccatgcatatgagcctttgacgcatgtacttaattactttggtcgacgagatcaaagtcttcgatgctcaacagattttccatctttactgatgatatcatatcccgattaggaaattagccaacgatcttaggtcatcaatgaacctgcgggcccagcccggcccaggtggcatgactctgcttcttcggtcgaaggtcaaaggtattgttcacttgagatagacattggaggggctattggtacatggcttttgccactttcgattatcgacaaatttcatgttcttcctaggctctagtgagtaggtctggccagtaccctgttttggatagtaagcacaacttggcgcctcgagttcatatgtatacattgtagtgtagagccaaggtattgctacatttacgttcgacttgacacgataaggttggaaaacttgaatatttgggtggatatgaaagccacagcatcgagtacccagagtaaggtcccgaggtctaacaggttacaagggcacagtgacctcattgacatttgtcgatcggttaagactgcactctcgccttcatttttacctacaacagaaagataatatccaacatagtggaaactgttggcccatcaattccgtcgcgtaagtctgctcgtccgcaatgatcgatctctactgactagtccagccatagactagcgctcccccacccatcggccgtggtctcacaccagccaccgatgcgaacatccctataattcgttgtttaagccacattatcagtcgtcagctctggttttgacgcggataagataacttcgacttcggttgatcattgtcgacgtcttgaattaggccttaccccgccgtttctccgcgaccatgtccactccaacgagccccgcggatgtgaaactgcctcagcggtctaacaccgtgagcagctccttcactcgtcgtacttctctgagtgacgatgaggctattcccgacggtgatagcaatgaggtttgtatccatggtgtcctcgaagaaaagaagtatattggactgacgatgtatttgtttccagactactaatctcctgcttgagcgtctccgagcatggaagcatatgtgcggatatctcgaggattacttctctgctaccgccaaagtgcagaagtcccagtccaaggactacgagaagatcttgaaggtcagtggttaattcctatgggtgatacccggcactgacgaagaatgggaatagaccgtgaacgaacccctcaaggaggcccaccacttcagtaccagcggaggcggcgtggctggtatgtttgagagcattcgctgcaacacccagggcatggttaccatgtacctagaaggcgaaaagaacctaaagaccggcgttctccccaccctcgagcgtctccataaagagatcaagaacaagtccaaggagctgagctctggtgctagcaagggagctaaggccgtcgaaaaggcgcgtaacctgacgcagaagcacatcgagcttctaggtcagaacgccgcctgcttcgacgccgccgccggcagcaagatcgagccgcacaatgacccgtacctcctcaagcgcggcatcaaccaccgtctgaacaaccaagtaaacgaggagaacaaccaccgccaggatatcctcgccgtgcagaactccttccagcagttcgaagcacacgtcctgcagaccgtgcaaggcaccatggagcaattccacctgcacatgaacgggcaactcgagcgccagcgcgccatgtacgccgacatcctcggctccgcgcagcgcatcccaccggactttgaatggatgaacttctgcgtgcgcaacgacgcaatcctggtcaacccagactcgcccccgcgctccttctccagcatcaccttcccgaacatggagcaccgctccacacagccgctcatcgaaggctctctcgagcgtcgctcgcgcgccctcatcaagggctacagcacaggctactacgtcgtcaccccggcgggctatctgcacgagttcaaggacaacgacgatttccgccgcgacccttccccggagctttcgctgtacctgccggaatgcgtcatcggctccattgacggcatcaagttcaacgtgaagggcaaggacgtttccagcggcaaaatcggaaacgccttccacacgaacaccgagcttagcttcaaggcccacacccccaacgacgcggagaagtggtggaccgttatcaaggaggctacccgcggcccggtcgccgctgcccctgctgtggcacccacgctcgcttctcccacggcgacgtcggccgcccctacctcgcctgctggcattgctagccccgcccgcagcgtgtccggccagggcctcccgcccacctacgccgagaaggagatggagaagaccgaggctgcacaggctgctgctgcccctcctgctgctgcccctgttgctgctgcccctgctgctgctgcccctgctgctgctaacccgactccgggacttagccgcacggctagttcgtctagccacttctacacctcgcccggtggctccgctgtggagaagtcgtgatataacctctgtctcgtttaggcatatatatttaagctcttttggttctgtggactttacccccccatatatactcaaataacgcatgtgcatctcgtcagttgattagggtgtagcgcccattcatccacccggagagcgaaacataccttgtcgactggatatatacctctaatgaatttctttccacgttaaaattgcaagaatcagatatcagcgctaactggatcgaagatcctttaactatcaaatacacaaagcaggcagagttgtatcgtcaaatcatatcatagcctatgctggaaatacacatgggcatgggctagctagataatcccagcaagcttcgcggcatacatgttcattgcctagtatcagaaatcctcaggactttccaagtcattcagcttctccccgaggaaacgtcctagcgcggcgcatttagactccagcgcaagcaagacggccggcgaggcagagaggttcaggctggccagacgcgcaagatcagcgctgcggtcaatctccaactgggggtctccgtgaccgttgtgaggcgcgtccagagacgcaggtgcggcagccagtgcgcgcgatatatcaccctgtgagtcctcaagcgtgggagttccattacctacatcaggtacggtgtcaactgcaagggagtcggcgttggtgccgccgttcggctccagtgcgtctagtttggatgggccgacggcggccacgaggactttatccgcgatctgggttaccacggccacggagtcgtcaagttcgaagacgatcgagcctacatcgcctagagacatcgacttggcggtcacgtaggatgaagggtggctggctgggttgacgcccgtcaagttcccgcttgaggctgacttggcgtagcatgtgtaggcggcgccataggttgcgctaaggttgcgcagttggcgcgaggagagggaggagccgtgggcgaagacggcgccgtttgttgcgaagacactataaatagatacagtcattaggtgtatcttgtggtggaagcacagctggcatacatgatcgttgtgatctctggcggggacaggttatcttccaagaggtcgcttagtgcttccgcgtccagcatcttgatatcggggagaccgggaatcatggtgtcggtgttgtcctggcctaccgaaggcgtgtattcctccacctggttcgagggttcctcctgcagtgatacgtgatttgcttccgcaatgcaatctttcggtggtgtccacgagcagtcttccgggaaaaagaagcagttgtcgctataggcctcgtcgtgatggtcgtattcgattggctcgtcggagtagtccaataggttctgagcaaactttgtcttgtgacgggcccagtaaggcagaaagttcggttcgaagggagattgggagataggtagggaaaaagttgtcgaggagcaatcggatattgaatcagagaagggaactggagaaggttcgcattcagccatcttcacacccatggatgcggactggacacgcagagacgacaatgtggggtatgtttaattcccgcagaaaggtaaaacgaataaacagagggcacgagggaagcaggtaagctctcatgccatgggcttggcaagtagatgagagggagtaagggaatacgcagagattcggatccgtcgactcgacgcgcattggtccaaatacaaagtcacgatgattccaatcgcgtccgatggtacacaagaaaaatcagagcaacagagctttatgaggcctggtatgaccagcaggtgtcatgaggtgtgtgtgaggcggctccgcaatgggagcaccatgatcgggcaagtatgaaggaagcgtgcacatgagcagagacttgattgggagaggtaaaggggggatacatgaaaccaagagctaagcgcggcagtaaaagaaagtcggaaattaaagaaaagagacgggatgcgacacgaagccgggaatggaggccaatggtaggaaagggatcaaccgggagcggggggagaaaggtctgaggatcatgcaagaggatgttcacgaacctggtctgcgaaatgtggtaatcggggaattcgaggggttcgaggggttcgatgttgggagttcggaggttgagttgggaggaaggaattggagatcaacttccccgttgatgtggagttcccggacgttttaacaccgaggtatatatacggctgcatacatatgtcgacctaatagtgtagctatcttatgtgtcatttgattgttcaactcggaattgtatattattacattcctacattgcagttcattattagccgtacctaaattgttgattatatatgtacttgtactccgtacaggtttcagattgaccacatgctggacgcctagaagtattaaaagtgatagactaactcacagaatctaattggtctcagtcatatagacaatatgctcctgattctataacttataagagctacctaggtataagagctatgtggcacaacgtcatgtgccccacactctcctcacggctgacaaaaagctcctttgcccctctgtctcctcccccaatgttcgctcgtctttctcctggggtcctcagacaaagatcctttgtaccaatcagtaggctctattcagatccagctcacggcccaattattgaccagttaccaggatccctagcaaccatggcttccgatccttccacctataagctcaaccgttcgtggacagtacttcaacatttttcgacacaatcactaacacaatgggcacattatagacacgatgatgcgggtcaaagatccgcagcgatcggtggatttttacaagttccttggcttgaccttggtcaacaagattgacatgcctgaatggaagttctgcaactacttcctggcgtataacggccccgcctctctccagggtgcccgtcactggactgatcgtaatgccgttctggaattgactcacaactatggcaccgagaacgaccccaactacagcgtggtgaacggaaacacagagccgcaccgtggcttcggccacattgccatctcggttgacaacattgaagctgcctgcaagcgcattgaagatgccggctaccccttccagaaaaaattgaccgaaggccgtatgcgacacatcgccttcgctaaggatcccgatggatactgggttgagatcatccgtcgcgccgatgaggatctcagcaccaccaccgaccctggtagctatcgactgaaccacaccatgttgcgcgtgaaggatgccgaagccagcttgaagttctaccaggaatccatgggcatgactttagtccgcaccattgagaacccagagaacaaattcaatctgtatttcctggggtaccccgcatccaatcccgagattaaggagggtagcaaaaatggagtggcggagtgggaaggtctgctcgagttgacctggaactacggcaccgagaagcaagaaggccctgtctaccacaacggcaacactgagccccagggtttcggtcatatctgtaagtggattatcatacaacttctaattgtttctacaaggttcctaacttgacataggtatctccgttgacgacctcccggctgcgtgcgcccgctttgagtctctgaaggtgaacttcaagaagcgcctgactgacgggcggatgcacaacatcgcatttattctagatcccgatggatattggattgaggtggtgcagaatgagggaataaagcgcacttcaaactggtaggatatagaaatacaagccaatgcatgtatatcaatttccagtcctgcttatcctctaccggaccctgccctgccttcagaacattttgatctcggggggcaagaaatgacggcttaatagcatgattggttcagaaccttggaagcaagccacccgaccaaactcacatggatttaattgcacatatttcagccagaacgccatgaattatgtatagtcatatgtaacccccccttgggccttggctaatgggataaccctatcctcttttgatatacgtacctgcctgacttttgaataccgccttcctaatatggtgcgtccattgattctgccactactacgtagtaggtaccgagtacggagtatttgaattcagtttatagtcaccaacttttatcatatcaactacttcatcgttaacaactgcttcaaaaaccgcttcaacaactgctctgtcattatcaagggattaaaacatgtagggtcgaattagcagtggaggggggtcattgtaaccatccgctaaacgatattgtggggtaaggtgctgctttgggtatatcagtctgagtaatcagtgccatagtgagccctcattggacctccgcttcatcacgtggggtatttgcgcagctgacggactctgaaatttacccagtgagcctgactctgagcgcccccgtaaaagcgcagaggaaatatgtcacggtgacctggcccagctaatggcttgacaatgagaatttcgagaatttcgagttttgacgcgggatgaattcatgtgatttcacccatttcgtcttatttgcggggacacatcgccacacaccattggagcaagccacaacctcgagcttcagaactcttggaagaaatcctcgaggacgtggcctcgaaattataaaccatgtcggctgagccagagaaaacgaaaaaggcaccccgtaaacatgtcaccactgcctgtgtgccatgccgggagagtaaaatcagggtatgtgctctgagcttgagtcaaaaaatcctaaatggcttcaatcatctaatgtgcctgctaccagtgtgatggagccactcctaactgtcagaattgtcagcgaaagggaaaagaatgcaaataccaacatggagacgacaagcgcaagtaagtaccttgtttaatgtgcggaagtgcctaagcgacgaggcagacctcataggcatacaccacttcatgttcttttgctaatatgaactagagtatctcttcgggcctcaacggagctgttctccgcccgcattgaccaactttgtcattttatccaggagcaggggctggtgcccccgccaatgaatccagaggatgaggctggcatgaacagggttttagacaccctccagatcccgcgcggattccctcaagcctcagtagtggccgatgaaaagcgaccggcagatgatccaacggcctctgggggctcaagcaaatctccgtcccaagatccacctgtcgtaaatcccaagggacaaaccccgatcaccaatttggttgcttccggcgtatccccggcgcaagatactgtgtctaatggaaaggcaccgtcgcccgagggctggaatccctttggattggtaccgggtgcttcggacaatcaaaactttgtccattggggctttactttgccaacagccgaaagtttggacactatttacgccaatctcaacggcgggccgagagcctctgcaatgcctagaatccccctcaacgcagaaatgagtccggatagctaccagcttggcatggatatggcccagcagccgggtgttctgctaagccagctaccccacggcggagaaaacgattcggatagcggcgaagaggacgaagctgaaaatgacgttattgagcaattgtcgcaccgaattggcactttgaaaattgcgggtgatggccatctgcgtttctacggtgccacgtccaacctcaatctggtggatgtatctgcgacacagcagcggcagcggccagacgcacggactgtgcgccacgatggtcaggatattttaaatcatctccgggttggtcaacctgtggaccaagccctggaagatcatctggtggagctatatttcacctggcaaaaccctagtacatacattgtcgacaaagagatgttcatgacggcacgaacgaaatggcgcaatgagctcgatgatactccgttctactcggaggttctaactaatgcaatgtaagttcacttcatttttcggtgctgaaggaatttgctgacttgttgcaggtgcgcgatcgggagtgccttcgaggcacgctatcaccccacattcattactttccccaagtctctctctgaattcttcgcagaccgggctaaggcccttctggaaattgaactcgactctccttgtgttgctactgtccaggcccttgtcatcatgagctgccacgaaggcgcatcaaatcgtgatgctcgaggttggctgtatagcggtaggcatatatatcttgaagataggaggcaagtaacgctcattggctaattgctttgcagggatgtctatgcgacttgctttcgatcttggtttacacctagatatgacgacatacgtgaacaagggcgaaatcacccagcaggaggccgatgtgcgccgtgcaaccttttggggaagctatgtggcagaccagtaagttttcgtggttttcataccgtcaatatctctaacagtaactagtttctggggcttctacttaggccgcccgttccgcatgaacgccggagacataggtgtttcaaaacctggatctgctctttatcctgaaaaggaacaaaactggcatccatacggccatcaagctgctcatgggctatctcagaacggtctgaggaacccaatggagctaatatgcaggcaatttgtcgttctatgggagatgatatccccagttggtcatattttgtatgtgacttatgcatattatccagcacagtgctaacaagcctttaggtatggatgttccgacatctctcggcacgacctgcaaagaatctgctatcaagtgacggaagatttgtttgcctggaaagcaaatcttccttctagccttcagattgatctggacgatgatacatcgccaatattgcctcatttgatgatgctccagtcagtttgtttcaatataatagatccccagaatcatactaacagtctcttgcagcatgcaataccaccagatcatcattttcttccaccgcccatggctttccaaaagctatatccagccccgcagccctcgtcaaggccccgggtatcaccatgcgcggcgcatgtgcgtggagtcagccaccgccatcgcacgactcctccaactcttcgagaaacactacaccttccgccgcatgaacaaccaagttgtagcgataatattcagcgcagcgctcatgcttctcttcgtaacagtatccagttctccaatgagtccaggcaaacaaagtgacagcccgacatacccccgcagtccggaaatggtagcatatctcaatttgtgcttccgggctctcgatgaactgggccaatcattcgacaatgccaagcgcacccgcgactaccttgttacactccagcgacgttggcaagcaaacatgcgccgatccggctctgcggcgaaacgtcaaaacagcagtgctaatctggcgtcgctaggctcacagaagccgtctacactgcacaatagggctgccaatacccaaggaatagatggctcacggaagaaatcccgtttatctgtttcagaggtccctcccaatatgcagtcaatagcacctgtggcgaccaaccaatactcccgcctctcacagcaagccatgcctcctcatcaccaatatcatcagcaaagctcatatcaacaacaagccccctttcccgtccccgctcccgtccccgttcctgattcccagctaggcgatctagactggatccccaactcagacatgcgtcttttgtccgagactcaaaccagcaacgcactgaatggcatgggccaggttccttctccttccttcgccgaggaccctagcatgctctcagaaatcgcagacattgatggatggtggacatcggaaaattacacgagaacctcaatgccaccatgaaatcattgttggatgaataattacagcattgcagagactcaatccttcgagtctgtcaaatttgtgttgcctggaagatagaacggacatcctatgatcgaatgatatacaccactccaggcatggagggcgttcacataaatgtattattatttccatctttcaaaactggggcctttatgaattctttgcatgcgcaatttcagatgtaacttcgatgctatatgcattgcaaccgattttaatctatatcctccaatgttccttggaacacattcttgaaccagtcgcccacttcctctcccgcattattatcagtactccgaatctgagataaagtaactctccgctccccaacccccttctcccgaccccaaaagcaagcccgccgcatagtagagaccatctcatcagcctgtcgagcaagaaccgtagacccatgaccaccatctctaggcttcttctttttctttggagagagagaaccagaagccaattcagcaccatcctctctcgagaacacccggacccaaggcaaagccatttccaatcgcccaatgccatccccaggtccagaccacgtatccccactgagcccataatccataccatacggcggccaacgcgaaagagccttccggcgccgggtaacagtagcgccaataccaccggtatcgtcggaatccatatcgggacactcccaggtcgacccgtctaatgctgcgtattgatcggcggatgtcgtgccccgcgtctccttcagtacggggacgggatactccggccccgtaagatactgcgggaacgtgggcggcacatcccggcccgcagagcggaggaagaggattggcgaggcgaaggagtcgaagcagcgctctggggttgagaagaatttcgagcgggcttggaggaggggcactaggtctggcggtgctgtggtctttctccttggctggcgcttttgcgtggatgctactcttgacttcggagtggtattatcgcctgcctgtgttttggggtttgtgatagtgctctcgcgcgtgcagtactcatccagaccgggccagtcgcaaattggttcaacagcggcgatggctcggatggagcgcgcttcggtcagacccagcataagagctagagagcctccgatatgtgtgccgaagatggctagttgcgctgggcggaggtgagtttggatccagtcgaatccggccagtgtatcgtggactggggttggatatttgtaagaggtgatttgggggttgcttgatcccagagtttggtcaggggcttcagattgctcttgcgagatagagctttcaactgaagatgagggaatatatgttggtatctcgccgagacgatagttgacggttactaccactgcagacgcagtggatgctaggacatgctggggtgaggccaaggagttggtatcaccagtcctttggtgatcaacttcactgatttcatgattttgaggtgcgctcgttgcatttcccagcaacaaaggtccagggggaaggtagaggattacatttgggccttctggagacagcctctggtgggcgctcggtcgcgtaattctggggatgtagttagcatatatcactagggcttataaaaatatacatgtgtactttagagaaatagccccattgtttccaagaggaagggaaattgtttcatcggtgcaatcagatgaaacggtcgaatatcgcgagcttcggaaacacgcgacggaaattcgggtagctcctctgctgcgacgcagtaaaaggcctataccacgggacgagtagataatacctcgcatagcactattacagcatgcacttgatgtttgataaaacttgtcaaggagggttgttggccttgctatccgaaaccaattgatgcctgaataatatggccatctccgtgctatcaaattgcttcgacgaccgcatgtctcatcttgatataattcattacaatctcagtgttatagcattctattcaggactaagctaatcatgcaaaaaagccaaattttcatcgcttgacaatttaaaatgaaacaaaaataccgtatgcaccatgctctaaataaatagatgactgatccaagagtccctccaggaatatgaattttgccgagaggcagtcgccgacgtcgccgacgccgcagggtcatctcggtcgagaggagcttcagtatcatcctctggcacagggcgcacaacctgcagactcaacatcggatccttggagtaaacccgcagtccgaccacacagacggcattccacgggtcaacagaaggctcatcatgacccaccgatggagggtggttcttcacacccgtctcgtcaggaggcatgtcgagatcgctgtcaaattcgaacccttctagtaattcaagatcaccctgatcaagagtccctgtagcaaaacgagcatctaaactggcccgcggagagtcggctctacgtcgccaatcattgtttgcgtgtcttgcgtgcaggccctggccgccgttgacgtagatgctcgggatagaaccgttgacgcggcggtcactgttttcacttgagatgcttgaaacgtcgatggcagaatcttccattggtttctctaccagaatttggctggggacataatcgcgttcgaagttgtgatcgtaggagctgccgctgggggtgcgtccgcaccttgctcgcatccgctcctgtcgggcgcttagcttttgattgcgaatccagtccttctgcatcttttccttaatctcgtctcgaagctttctccgctcagctgctttgaatcgctgctgctcccgcttttcttggtgtgtttcgcctaccagtccctttgcatgcgcgaggtcgtatgaaaggccgacttgcactagtttctctcttctcgtcgaggcaacctgacggacaatttcctcggtcgagtctgcatcttcgtggcggaaagctgtgatcttcatcaggacgtgatagtgaccgggatcaaggtcaatctcggcgttcacagatcggcccataaagtggctgctatggctgcgcacgagataatcttgttcgccttccttctgcaagcggaacttgagcacgaagctgtacttgccggctagtcctttgaaatagcgcgtatcaagctgaatctgtcagccactacacaggagctggggtaaatggcgcataacgaacctgggataggacaatgactaccggtccagtcttagtcacatccatcatgaatttagtgctgtgataatccgcggaccagggaacattcaaggtagtccattgctgggtaatggtccattcagctccgaagaggcgtgtccgatcgaagtgctggtatttcctgaggagatctttataagagatccagaagaactgggccaggtcagcgtattgagtgaaagtgcgatcgacgaacacctacaccatcattgccaaatttatggccaaggattttcatccactcgggtgtccattctttggatccatcaccccatgcaccgtgccattctttgcgaccccatgggttcctaggtgctatgagcctcttgatcatttcccttttgacattcatgcacatacctcagtcgcagtaaccggtggccgtcaatctcccgggcttccatgatggaataggagtgaccctccgcgataccctttcgatcccttggtggaccccggtaattaggatctaaccagtttgaaaataggcctgtcccacaaccaaacaggaattctgtgttgactttcataatttcctcggtccaaaagcggtccttgttcaggatattgctagataagacctcagacgtaacgcctccggtgagatcctcgatagcctcaccaacaaatccaccctcaatcgcggaatagtctccatgggcctttgcgaaggctttttctagaagaggtagccacgtctcattgtcgtcgacgcactgtgcgaagtacagggcccgcgggcccggctgcccgacccgcccggccnnnnnnnnnnnnnnnnnnnnnnnnnnnnnnnnnnnnnnnnnnnnnnnnnnnnnnnnnnnnnnnnnnnnnnnnnnnnnnnnnnnnnnnnnnnnnnnnctggggaaagacgggggcccgggagcctgtctgccagactcgccggtactcttcctccgtatcaatccgagttatgtcgtcccagatgggtcgctcctccacagactcatcatagtcagcagcgcaaagatatagtttgtcatctataatgcactgctgccactcgccgtctgatgattgaagtcagcatggttcccagtctgattgggctcggagcatacgcttacctcgatggaaaacaaatccataaatcccaacctcttgatcgcgagcaacacaaatcttctcgatgagctcctccttgttgcccatggtgcaaagcgcagccatgagccagcaatccccatcatatccctgccgcacatctgacgcggtaggtccgttaacaaagaaccgcggattttcaaaaatttcctatatgaaagtcttcagcaacctgcaatctgaacactccatggcatatcatttcgaactaacagtcactcttttcacgccccggggtctcatctgcatatttggtttatccaatccatcgagatagtgtctccggccagacttcaggtctagctcgatatcaaagtgtgggtccgaatatctctgattcatgcgctcgcattccttgacaatacggtcgacggacttttgacattcctggcgtgcctgctcgtacgacttgacagcctcgtggccctgaatacggccgctgggaacatgcttggcccgtgtccgtgcatatggattgtccggcagcaccgtatatactttgcccgggtacttggtgttgaattgttcccagaattgcttgatggattcctggggcggttgacagcgtgtacggggcggtcgactgtttgagcgcgaggagcttggtcctgctatggcatagcccatttcgtcgtcgaattccatgtcctgctgtctctgggttgttcttcgcttggttgggggttttcggttttttgggggggaggaagcacagaggtggtaattctcaggcggctatttctctcatatcgcactaatcactccgcaatgacgatcatagatgaaaatagaaacacggattctgttcttgttctaagcgctgggatgacattcccggattttcccctcacgcggccactccgaaccgagaacatcacctcagccttcattccctcgtattgatcagcttattaggcctgatcttcgtaaaagcgttcattataggctgaatgtgcattgtatcagcggacgaacgagcgaatctgacagcaaatggtgctttcggcccccacctcgattctcaggccctcttataacggccacagaaaaaataatgaactggaccagacttggtgatcttcagcgagtagagaagtgagaaatcaaggaatagaggaatagaggaactaaacccggaaaggatgcttagcatgtctcgttccaaagtttcgtggggcaatttttagctgacacgagatgactcttgacctaacccgaggctgaagaagctgaatacaatggtaccgtcacatcatttttcatatctgattacagggtagaaagggtatgtacgcctgttattcaagactaaaacacttcctatgcagtaagcccgccctatcactccccattgaacgccgaaagaggagaaagaaaccatgccccgagaacatttcccacagtgaataagatacactgaaaatgtgtgtaatcatcacactaatggaagccgttacttggaccacgtccagagtagtatgcggtgccgttacggaagtacgggtgtaagcaggcctgcttggccgatagtcggtgtgcagggtcaaactcgagcagagattccaagagctgacatccggcctcttccagcccgggaacaatctcaacgtcagggcgcttccacttggggaatgtggatttataatcggggaacgaggtcacgccgggccagatgtcttcaccgggcgtaccaaggatgctgcaattcgttaatacggttgaacacagaataacagaacaatgcttaccggaaaatcttgaagatctcgtcaatttcagagtcaccggggaagagaggcttgcgtgtacacatctcggcgaaaatggcgcccaccgaccacatatcaacacccgtggagtattgacgtccacccagcagaatctccggagaacggtaccacaatgtgacaacctgtcgattgcgttagtaaacaagcaattccattaatgcaactgaaaattcaatgcatacctcgtgagtgtaagtgcgaaggggaacaccaaacgctctggcaagaccgaaatcggccaacttcagattgccttcacggttaatcaacaagttctggggtttcaagtcacggtgcagaattcggtggctatggcagtatcgaatgccctcaacaagctgggccatgaatttcttgaccattgcgtcgcccaggcctggggttacaccccccttgaatccatcaggcaaaggcttccctcgcccaccgtcactgacaggcagagcctccatgtatttcttaaggtcgcagtcgaggaattcaaagacaaggtagagcttatggccatcggcatggacaatattcagcagctggacgatgttggggtcctgcatctccttgaggagggaaatctcgcgaattgcagtgctggggacgccctcatcttcggcttcgagtcgaatcttcttcagggcaacgatacggttggggtgattgagttcacgggccttgtagaccacaccgtaagtgcctgcagaccattgacgcgtgagttgggctgtaggtaacaaggtcaggtcggaagtacataccttcgccaatcttctcaattttctgataattatccatggtgcccgacattcgatccttcgctgctgttaatgagattaacaattggagaacagaaagaccagaatggggatttgacacaaattggagggatgttgccaagaagaatttgtaggggaagcaaggagaagaggtagctactacttactccgaggatgttggtatctgagaacagctggagcagcacgctcttcaaattccacctggggttcaaaaaagtaatttgttgacgagatgattgacaaaacacagtatttcaatggtggggagagaaagacacaaaacaaacaacccccgcgcccatcatagggcggtgaaacgcgtaccttttccttcgttgttcaactttctctttgacttcatatcttcgcaatggcccaaattaaaggtcttagtgcttatgatcgccctcctgatccagtgagactttgctacaagaaatatactaaaattgccttgtccgaggttgacaatgatccggggatcctcgacctacaagggatcgattccgaccaattgcccgacggagtgacgatcgcgcagtatatgtgcagccaggatttgcgattggcatttgatgatttcattcgtggaagccatgctgaaacagaagaggatacttctttgactgaggatattccagtatacgcccataaatcgatttccggttagcattgtatcgcctcgatttagaactgacccagcaggaaaaagagcaatgcctgacctcctgataggcctcctgatgattcccgccatgttccctcctactatccagatcgaactgctctctcgcctattccaccgagacttatccaaccccgagcatcagacaaacctacacctgcactacaatgtcacgtaccccgaaaagtcggaggacacccagatgcccaagtccttcttcgcagacgatcccactcggactttccaacccaaagatcctcagcttcataagcccttgtcggttcaaagtttcttagagaaaaagctgcgctgggtaacattaggtggacaatacgactggaccgccaaattatacccatccggaaccccgccggagtttccgccggacgttgcaaaggtgctacgtgcggccttcccagaaacatcggcccaggctgccattttgaacctctactcccctggagatacactgagcgtgcaccgggacgtgagcgaggagtgtgacgtaggcttgatcagcgtgagtttcggatgcgatgggttgttcttggctagccatgatgacgggaatgggtgtgaggttattcggcttcgctcaggcgatgctgtgtacatgaacggtaaatcgcggttcgcctggcacggagtcccgaagattctgccatcgacctgtccaaaatggctagccgactggccatcctttggagagtctgttccgggaatgccgcctaccccatacgagatgtggaagggctggatgtctagcaaacggatcaacctgaacgttcgacaaatgacgaccactcaggcttccaaagagagagcagatcacgtttgaaagtggaaaattcagatgtcagtaatgtcagattctttccttggtccaaacatggacaatattctatcttaacctactcatgtacagagacagtcatgctgttccaatgagtctggtcaaacatcgcaatccaatgtccgaaagcgttgctaccattcacaagacactttgtctcccgctggagagcaattccacaaggtttttacctgcgggatatcaagcacccacccctttggacgaatcaattgcacccaaatagacattttctgctagaaaccagatcggctcgcttcattttgccagaagagtgccttactaagcatatcaaactttcaaggttcggaattgctcgaggttgctcgatatgcggaagagacctcgggagaccatactgtatctagcgcgtagtgctttatcatgtcagtaacagagaacctgggcatcaattacgatcaagatgaagcattgggctttcgtatgaatgttgaggggaaatgttattctctattaatatagagcagagggagcagagcaagccacctactgttccaagcgaatgcagagtacaaagaataacccccaggcgccttgtccgatgcttttctacaaatattatattccacgaccagtcagttcctggatgacgatgacggaggcgtctgtccagagggtgcagcaagattggataaatgaggcgtggaagatccccaagttttaccacctgcagaaggcggagcatgaccagactcggacgaaggaccagacgggtcttccgagccattcatgaggcgctgtcgcttcgccgcaggcagcccacctacctggggcatgccgctaggtagagcgccgttagacgggctgcgaggatctgcaaaagagtggggtgaagcgtagtgggtagatgaagcaggggtggaggcacccgcgacgtctgggctcaaagctgtggcagattgcaaggggcgcaagcgattcggatgagaggtggtgtcctcgcctgggcgtggaggccggacatcagggcttttctgagactgactttggtctggatcccctagctgactagggtttccgtaaccaaccccaatccggcccatgcccttatcgtgcataacaacacgtctccatttggcaaccacgctgtcgtagtcccatcgtgtcgaatcgggactgatgtggctctcttttgcgtctaattcccgtgctacctctcgtggtagggggagcgtatctggggggaacagtgcgaactcacgaggccactggcatgatccgaggcgctcgacctgcgcacgcaactgatttgcttcctgttgcactcgagcgagttgctcgtccgaggacttgcgcttctctgcctcccgtgcaaatgcacgcgtgatctccaattgccacgcatcgcgccgggtctcgtgggacagggaactccaatgattgaaggccaattctaagtgtcggaaactgatatcctcgtgctgttgtgcactccggtatatcatgttcggatccaccccgctattcccatgtcttgtgtaaggcgcagaagtggaggagtctgctgcgagttggtcggtctgccattgtgcaaccttggaacgaagggcttggcggattatatcgaggtgctcggctccggggggctgaaggggaaacgaggtagaggagggaaacggatgcgtcgcaaacaggcttggtgggggagggagcagctggagacacatggagggaaaagtctgagcttgaatgtcgaagtcgaacggagatagccggggccggatacgagagctaatgtttcgtgagcttgggggttagatacaaaatgatggaaatgagtcgacatacgtcgcagctttgatattatcaagcacctcgcgcagtgcgagctccagcgcccgcatcgtatccgggttgctggagctagcacctctactcgcatagtccggaagctgtaaagaccctgtgtgagactgcgatggcgtcattcgaggcccatccggtacgcgactagggttggggatatcgttgatcacccccgtcgcatgccaggtaggtgtgttgaacatcatgcgcaccggagcttcgcgcgacttcgatcccgagtccccagctgtaaatggctctgaggttccctttttctggcttcgttcagggctgccctcgttcttccctgttgatgttcgtgcctggcgccgggtgattccgctgcgaattcgtctgatctcttcgacgtcgtggattccgtcaggtttcttcttaaaaaggaattggtcgaggtgtcgacctaatgatgaagaggtaaatgcttgttggcagtactggcatttgcgatcctttgcagcaagactggccttcgactcgtcaccagcggtcgagccgtcgggggtttctctggagggttctatttcttccttcatggtcggggacgtagaaagatgagatgaatgaaatagatagtaagcttttcagcttataatgtcatgacatatgatatagtgcgaccagaagcagcaagctggtgtagggaaaattcaacgtggatgagagggaggtgagaaagatgaacaggaaaatgccaagcttttgggcgcggagctgcgcgagcaatttttgtgggccaaggcacatggagatttatctatgtcggacttattgatctactgatgaattgcatgtatatatcgtgtgaaaccacttcaatgctacctatgcaagtattgagatagtctctgcaatgtaactaggcccctcgaccaatagatcaagcagaatcaatgtgactgcctgggtgcatattgtacttcgaacaaatcagaatcaagaactgcaattgttatatatttgtcatgaccatagaaacttccctctaccttatcaagacacggacatcatgttggatcaatgacacacgcggatagggggaagtacaacactaagcctggagagtctagcacacgatgcactcatgcgcagcatggaagacacggtggaaccatgttcaaggacgagctttgctctttctcgtcttacgcgcactgagccagcgtttcacgtcgctgataccgtgcaaatacaaccaggagaagatgaaaacaacagcaaagttgaagataatgaatccccagatgatcccctaatggatgttagattaatctggcactctgaaggttagttaaaggggtatagatcacgatactcacataatctctccatttgtgcgagtaaaaaacattgaggctactagcctgaaaaatgtaacaaagttctagttagctatgctccaagtctgctggtcaagacattcagaagcgaaacttacaaaattatcaccgactgagtattgacagaatgagcacattccattcccaatgtctcggacatatccaccggatttttcggcataagacccagcatattcttggcagttcatgccaggtggagtgctaaagcgggattcttcgcgctcaatacaccgcacggggacattatgggtgatggctccaacaaatccctcaagcagatagtggaaaggcgtaagccagtacatccacgcttgccaaaaatgcggtattgcgacataagggacgacaacgccgcagaaggaagcaacaaaggtaaagaaagttggcacgagcaaacttgcaaatagcacatttggtgcaattgcagctatgaattgaccaaggccgatataatatagttcaaaaagcatcatcgacatccaaacgtagccggaggtaaacgagtcgcgcgggaaccaagttccccagtaccttttatatttctgtcagaggggagagatgaaatgccttctcaatagacacttaccagcagttgaagtaaatggacccggcaacaaccgagtatggcagttctgggatgattgtgctcgtcacaaaggcagcccaagagtagatctttgagttagcctctcgagattcataaaggcctcgaaaatgaatatatcgtggttggagttgctgtatcagcggtggggctatcgtcaaggtcatgaaaacagagaagagtcgtgattgcatgtcgataaagctatttcccaaatgccagaatgtgaaggtgttgaaaaggccggtaaagatgtggagcatgaatttaccctagttggcaattaggcaagtcattcgggcttgttttttgagacctagtgacttacaaggatgtagtctgggatcctccagtaagccacgaatgcgcgcttagtgactgcgactgtttgaacatagagaggcatcgcgtactcgcgatcgtcgtcaaccttctggtcattttgagcgttgcgacgagaggcgattataccttcaaggtccccagaaagctgtttggattctggtgagttggcccatacattgccccagtcctgtcccttataatcgggatttccggctccaatgacttccaacatatactagatcgaatatcagtgagaaccaatacatccagctttataatacacacctctgccggattttcatgtggtgagcaattcctcccgccgttttgttcaaagtaatcaatcagcgtcttggagtcgtttccaaggggcccattataaacaacaattccaccgcttttcagtagcaagagctcatcgaagttctcgaataagacagcagaaggttgatgtattgtgcagagaatggcctgaccggcatctgcgagtcggcgaaggaagcgtacaatgttgaacgcggccagagaatcgaggcctgacgtgggttcatctaggaatagcaaaagctctggtttacttgctagttcaactgcaattgtgagtcgtttgcgctgctcttggttgaggcctgagcccatggatccaacaattgccccggcgatggaacgcatttctaataagtcaatgattgtctcacaataatcatacttttcttttaatgggacttctttcggctgccgcaacagagcggagaaccgaagagactcccgcacagtagcagtgggttcgtgaatgtccatctgctcggcgaatcccgtggctctctgaaagctccttgggagaggcctgaaaatattaatattcattctcaatgaaatactcaaagatatcctacctcccatcaactaagaagttgccggtgaccacgccaaaattgatgcgctgtgctagcgcattgagcaaggtggttttgctagtcagacattagcatcaagaatgaagtcaaccttgttacgtgcttaccccgagccagaagcacccatcaatgcagtcagccgaccaggcttgacataccctttaacattttgcaaaagttgtctctgtccacccttgtatggaatggtgtagtcaacgtcttgccatgtaaagattgccgtgtttgtagcaatatcccggactttttcatgaggtacactcgtgtcgccgttgttttcgttggatgctgcgccatccgcctctgtggactcctcatcttttcgggggccggattgcttgatgacatcttgaactgcttggggggcttcacttcttttgaacaccgtgaccgagctgccgcccttattaggtctctgtaattccattcccaacattgtcaagcagacgaaaaagataagccatcctgtaatgatgccgaaattccgccacaggtgagccctggagtaagtgtacgccgtttggatatacttgggaccatgaacgatcaactggtctatatcactgccttgtattgcacatgactggtgaccaggcacagcatttggcccatcaggcacaatgtagggcgtttcacatttgatctggagattgtggaactcgttggccatcaatgcctcgaatgcgtattggacagggttgatccaaatgagccactttaaccatgggtgcattttccacggtgggatgagatagcctgaattttgttggccattaaactcgaatattaggttccattctgctgggctcacctgtgtacacaaccaatgcctgtatggcgacaccagtgaggcgggtggctatatagtgttattgaagacttcttgattccgagaggtttgttccactcaccaacatccaatgaggcacatagagcccccagggcacgaaagaaggagtacatagtcattgtgagaatgaaaatgaaaagcagatttataaagaactgtgagggtgttcgagcaagatttgccatgctaaatccatcatcagtttgatccacgtaaagaatccaatgagactcacaagtagactatgatatcaaatagaacgacttgtatgaacacgagaggcacatcaaccacaacctgggcaagcgcatatgctgctggccggtagaaagagctagaaaagattagtcccatcattttgtctttttttttatagtcctcacaagcttttgtgtttcatcaaaattggtcggctcccaaatgctgctgtcagctctgccatagcaagcaatgaattgaaaagcagtataaggaacatcacaccgcccctagtaaaaacgccagaacttgaaacggtgagccatatggagtctcttcgcatttggagaggcaattgcttaccttgtatcgggaaggttgtaaaatagactaccaataatgagagcttgaaaggttatcatactccactttccaatcaacgaatctctatcaccaatcattaccagaaattgacgatgtgtgagaatcataacttgtttgtagaatgagatggtgaagttttttcgtttggcctcacttcttgcagcctctctctcctgcctttggctttcgatatcgccctcaaagcttttcatatccgctaggttgctttggtaagtatcacttttgcgatatgcagcttgaaattcagctgcattccgaggaattcggtcgtcccagccatctttgacacgccgcgcataggggtcattgacagaagtcaaaaagtcgggagttgtccaacgcggggggcattcaaagcccagtccttcgaaataggcctttgcgtcctgggtagggccgaagaaagagcattttccctcttcgattaagatcaccttgtcaaaaaggtcaaatagattctccgatgcctggtagagagctactatcgttgaaacgttggcggtatttgttagacttcgcaagctttgaacatactctagcgctgtactggcgtccaaacccttggtagagttgtcccagcactgggtactagcctttgtaaccatagcttccgcaattgaggttcgtttcttctcacccccagaaactccacgaatgagttcgttcccaactttggttcccagagcatgttcaatccagaacaacttagctatggcggtcaagaatgtctgctggtattcctttcggctttctcctggtattcttgaggctttgtcgggggttcgagctttcaaggcaaaaagcagtgtatctcgcacagtcaaagttgcataatggagatcatcctcggggttgtacaagactgatagttttagttcggaatcatggtcacacagacaaggacacaccttctgacctatactcctttgccattttttcagagtctgtgccgccataccgcacatcgccttcaatgctttcgtagcccgctcgttgattgccaagcattttcaagaaagtggaacagccagagccagggcggcccaaaacaagaagcatctcccccggacgaacacaacccttgatatgagatcagtcgggcatatctctaggggtgagaaatatactcacattgaaatcatctaagatagttcgtatcgctgcttttttggccccggcaccttttctgccccgagtgagtagttgcttgatgagccgtggtaagccgagaaaaatatccccgttggtgggttgtagagcagctccgaggcccacaccttttacagtgaggttcttccatagaactccaacatgacgtgttttctcttcttcggaatttgctttgcgctcagggccgaacatccgtgagatcagtctttctatctgggcccattcctctccttgaggatcatgaccggaggctttgtgtcgagatttagtacgtgcgaggccatcgtcagttttctttggcgccgtggaatctgcctgggtgtctgatgaggcagtgcgggttggcgtgtaagcttcggatggagacgaactggctcgtgaagatgaaccctcagaggaagaaacggaattttcaggaatgtgttctgggtttgtagatgatgcggactcgctttccatagaatggtcgtttgccatggtcgttttttgagactgagcccaggccttttgaggtatgcgattatgagacaacgtgatatcggatgactatatatgtagctgagcgcaacacgtcggttagcgacgataagtataaacagaatcactccgcatggatatcatgaatgtcaagaaaatggaaaggggtgtaggtattacgtcaagtatcattgcgaaaagggaactcggggtgtcggaacaggaacgaaccgcaatattatccagagcgtctcttatttgcttgattttgtagactgtaaacgagtacatgtgtcatgtgtagtgaggtcatcgcgtccggttctattatatcgtgcgattctttctttctgagcctaccaaccataaacttactaaatgtgaacaattaatttcaaacattttctactaagttctaggaggtcgtatcgacgtacgatgcatttaaatcccccgcagtttgagttgtctccgatcatgaagtcatcgatcgtacaatatggacatggatgtcatggagtcatcttgaatgccattagttctgcgcttttgatccttattctttggctgctggttttaattagtgtattttctcatatctaataaatataatcgccctggttgtttcccactgaacaagcttcgccgatttgtattcattactttttttgggggttaccattgctcttgtcctaagtatctcaaatccatattgttcatgtagttctaaatagattgcattaagaagaagagttgatggggcctaatgcctaggcaatcatatctaggcgtgtcagtatcagctgctttcgacccacgaaggttgaccgcttcgattctttgattctcaggctgatctttcaaattatatagcttttattttggaatgaagcacctcgtgcccggaaacataatgagcagtgctgtcagcattaccttcctacctatctaggaatataaacatctacggaattgattaccgacaacatttaccaactcgttttactacagcacaagagaaccctatttgtgttagtctaccaaacaggtgtgacgagagtaactctacaatcatgatctcgtcattctaggacaggttagtcaagcatatcagacaaatcttgactgcatttatcaatgcaaaagctagatagagcagcacgccatgattacagcatattactctccggttcagtagtgataaatctctagattccactctaggagcagggaagatgtatctctcaccctagaaaccattccggcttcttctgcggtgttcttgtgcagctttggtagcaatgaagccccatcgcgctcacagatttctccgaaaggtgttggactttttccatttatccactccctcatcaaagggtgcagtcaaagcccgcagcaagtatgtctccagccttttcgtggtattgcttgccaaaaattaatggcaggttcagtgctaagctgtggtgtgttgctaccaccacacctcctcttcacagcatctccgctagccgaggatgtgaccagactgaagtgaatggtcaagttgatgatcctcctcaatattccttcgacggcgcagttcttgaaaagccaatctcgactcgcagccaactggagggtcgaattgtgaaactctggaagaaagtctggctgggcctttatcagatcgatgataacgaggatcgataccatgtcgaacgactggaagcactttctctcggggccggcttgactcgcacataccgagttggcgagcttcaagttctcaggcgtcattttcttcgaagcgagaccaacaatggaattgcttcgctgaagcttttccggggtctatcactttcgacccttctatccgtgatccatattctggaggcttatgaaagtgaaattgagaacttgaggctgctctattccatcttgcgaaggggtcagctttcactgcatgagactgctgatcttgctcaaactgctgttgtcagaactgagtatatggcaattgcggagccgatggagaagcggatcagacagtatgatattcgaatgaatgtggtaaatatggatatctgcgatgaggcaatgggtttctatgagcgacaaaagggggaatatatttaccacaaggcattcccgaatgcgtggtaaatacggggagtttttggttccatcctgtcccgtttcacattgactaaactagtattggaggactttgagtacaatcagtataatttggatcaaatattaatgttataacttcaaggacgtttgaataaaaattatactccgtactcatgatgttattagacatggtattcacaagttgtcttaaattcgaggggcccccctttttttggctaatgcgaccctggactcagcttaccgccagccacaccgccctggtgtcgaactccctagcaagacagaattaaattgatgccttatatgtaaggtttgatatggcagaatctggcagaggggggtcccattaaaccaaaggggggggtcgaattagcaattagggtccttataacagtcccaaaattcttatagtacatacttccaaccttcttgcaaatatctcctcggggccccttgatccctcaaatgccgcattatagagaacaagttgcaattgcagcctgaaacctgggtgtgcacaggtgctatactaatccaggtacctacagggcttgagaatcaattcaatccatcttccacatcaccttcagttgtttaatagcatccccgtacatcctttcacgcacctgattccccttccagaaagagggctttttatcaaatccgtgaacagcatcctcaatcacaaacccgcctatactcgccatcttcccgtcttcaacgaacccaccaagtctttcccggaacgtatttccttcaacaagcaattgatcccacccacaagtatagattgccacagcaggcggatacgccgcatgcaacagagatgcaggtgccagaccaggcgaaagataaggatgcgacatatccacccggcccgtccccggccgtatcggtaaacccgcagcgagaagataggaatcgtcgaagaacttgaataaagaaggagaaatcatggatttttgtggggcgataggatttgtagcgtcacgctctttccgcgttcgtgtccagtcggtgccggcgtagaatactaccaaaccagccaacgctacctccccgcgtatcgacgcccagcgctttttctgtagttcatcgtgcagtctgaatggcattgctagagcgaggttcccgcctgcgctggctccgctgagcacgaagcgcgttttgtcaagattgtacttctttgcttcttgccatagccatagtatagcaccgacgccgtcctctaatgcgacggggaagggttgctccggggctagacggtaattaacgcttattaccacagcatctgggtaggcatttaccacggtaccggcccagcgggcatcatcacgagcatggccgatggagaagcctccgccgtggaagttcatgaggacgggacggggtgggcatggcttggtttgcttgcgaggatagagggggtttgagggtgcggtgaagaagtagagttggattgatcccggggctttgctgactgtggacggaatagcaattccgacgcttggtcctgggggaagtggccacgaaaggtatcggtctagtatggagagtaggtgggcgagcatgcgatatcggtgtgccttcttcctaagggcggagcgggacggggagggtgatatggatgccatattgtactgcaatgaaatgtttttgtacaaacgggcgaacaattgatgatagttatgtggtgttatatagatgaatgatgtaacttgttagtcactggacctgaatgatgcctgtcagatgttagtcaacatatcaaggaggatcttgtgtattatacgatttgagcgttgatattagaagcgaactgttgcagtaaagtgctaatattctaatggtggttgaggctgttttgtctccattcccgagtcgcatatagtaggtcggactccaagcttccagataaagagaagaatgcctggtcgtttataggtttcttaattcgaatttctatcccattagaaaagagatacggatcaatttacccattcttcacatctccaaattttctggtctgtgccctagacgccgggatcggcaagccgagcccgaatttgaaggtttgcacggagtactccggagagcatatgttgtacattatttcgacgtagttcgcgttatctcagagcagactacggagcagttaacctatttcatcggaaacctctccgaagcgtaatcggaaattccccacctcctcgtaggccgggatccctatcccccacgtcaacgacgtcggcacgaaagactacagccagcctgtgcatcatctccggtcgatatttgacttggaggatatagggcacgagaattctgctaaggtgctgaggggacactgtattcaagtcaacccttgtgttttaaactcggtatatccaacatttcagcgaattttctgttccttcaattttgagaccgggggggggggggggaatccgcagctcgacatcctacaaagcgtatcttgtactgggaatccaacgttcttaccagcgcgtttcgacagtgttgaaccatggatagtcagatgcattcgagttcggttgaaattaaatcgagatgggacaacaagtactgcagatatatatttcaccttagatggtctctcaccttgccaaacacaaagtacaacatatatagcgatggacgcaaacgtaggtgcgctggagtgaatcttggtattacacgaatggatctcctgcaactcggagagataacaatagctaaaatagtgtatacaatgcctgcctcgatcaccaacaccccatttgcaccttcccccacggtcatttgtcattgttttttttttcttttctccggatagctttgtaagactactcctcattcgatcaataccatgggtagaaaagatgcgtatgcatgtcaggtttgagatactataggctactcggagacggaccaacggaataaagagtacatcagcatataccggagccaacggtctcatctaccaaacatccaacctgttcttccacttgaccccttataagatggtatcctagtacagcgtttgaatgcacagtgtctacccaatcatgcatatagtgatatttactttcctaattcactatcatcggcatcaattgccaacgctggtggcgactttgaaaaatgcactaggacgtggcatctgttagtccacagtcaacgtagttacatcatttgatggcaatcgccgagtgaggtcacggcctaatcatctgcacctctaactggtagctcattaaactataccccgcatccgcagttcgagctaggacgagaccacgcgacaatttccccagataaaaagccaagacgccaagaagtgcatcgccagcgagatgtggaaattttagagcgatactgcccaatgccacaggtcatgggagcaggaagactcgggcgtataattttgcatgtttatcttatattgtacaacaacacgggtgaatttatttttgcagtactccgtacgatgaagtactccgtaataatctcaataatgacgtgcagccgctggagtcaatctcggggaaaataggaggacaaatcgatctttgtcccccttcaactcggcccaggccgttttcaaaccgtcggcgctggttgggcagatattttagataggtagactcgaatgaaagacaagaaccgtatcactacgggtaatttaggaagctaagtttcagaaatgattggctgtgattgatataaaggaccgagaatctactaattaccttagtgactgttgatccgggtaacggacataaagaagaaaatgcgacgggtgtggacgaaaaggggcaaagggcaattcccggaatgtgtgaatagattcaataattgaagatcacggggcaagcttagctttcaccatggctatactccgtacatattccgttttgcggaggattacagggggaaccccctttctccaccagcccttactccttcagggcgtgaacaaaaaagccgcagaacaaaaaaagcctcaaattcgatacatagttccagccagctggtattcgtgtcacacgcaaggcaggaaaaatgaaaatgatcagcagagttaaaaaaagcgaagacacttagtacgtaagtgaaacaaatcgcgcaaaaaaataactaattgtttcacaaagaatgggctccgggtagaatttgacaaaaaagaaaaagaaaaagctcgcgttcccgacgccgtagccggttcgggatccgccactaacggggagaaggatctggggttgtatcgcagaaatgcacatcccgaggcgacggcgacggtggccgataaaaacccatacattcatagcagaccgctcatgtgcgatattaattaggaatcattcttcataggctgtggtccaggccatcgccttcggcgttggaacgtaatatgcatggggttctgcctttggggcttggatctggagtaactgctcggagcctggctttgatctcattgcaccactataacgagcgattatcgtcgcccagcgaaaaccagtgaaaatagggctaggacccagcggcaatatcttctacccacccgatcatcctaggaggtagaaatataagcactctgattggtccccaccgccgcgatcaatggatgcatgtggcatcatcctcggctggttaaacgccgttatttgctgctgagtcctgctcccagacaatcgttccgagtttgcagccgagcctattgccatccgggggtgacagggtgagtttcattttgttttcctttccacgggcaacacattccgatatcaattcgggttgatgcgagccgaaaacagaagagatgggggatcgtgaagggttaaggttgatcgacgagattatgtcagctccccgcgattctgagtgggctagactaggaaattcttagacgtatatcgattgggtgaagtcattatgcgtcattcctgtcgtccgtggctgaagaattcctagatttggagaggcacttttggtaaactcttttttacgaggttttaggaactaatgctcagatgattgacgaaatgcaaagttcgcccacgtagactggggtgtttgccgcaagcgtcagagcagcataaaagggcccctaaactggtctcatgcacctctccttgtaaactactcaggaaaaaaaaatccattgagttatttttgattctagaacttctatctggttcccactagtattcgccttcccggtcatagatccccttgttccgaatcaagttcgtgctcatttgaataactcgggtcaagtcggactgcgcctccaggtctttgcaacccacggcagcacttcatccccatccatcaagcgtgttcctcagctcggcgttcagccccgacatcacccgtggaactgtggagaaacactacggaaagtgcacgagaaccctccttcataccaagaccgatcgtgaccatggcctctctcggaaaggattatatacccctcgaccgctccaattctcctggtcctctggcatcagatttctctcaacaacaagtcgctaaacaacgcaacaataactaccactctacttcactcagaaatatggttgccacatctgtgaatcgcactgccttgcaccccggcggtgttcagtatgttaccttcctatctcactgtccatacctcatcgtcgctaactgtcttcacttagacctagcaagggtcacaccgagcttgaggaggagcttcacgagactgctcacattgactacgaccgtgtctccattgtaagacctcaccacccttgcgctagacatttgattacaatgtccatgccgtctatcttgcttcatctactaacatcatttagattgccaacccctctgttcctgccctttacgaagatgctcttgtctacgagactggtactgctgttacctccagcggtgctttgagcgcatactccggtgctaagactggtcgttccccctccgacaagcgtgtcgtccaggaggcttcctcagaaagcgatatttggtggggacccgtaaataagcccatgacactggatgtgagtaaactttttgattcttgatgcgtgattacactggatatgtcattgtcctcattggagcacacccttgcagatgggcccgaggagatccacttggatcccttgcatatgcaccgggaggtcaagcttttcggcaagactctgtgcaaccttttgggttgcggtctctgccggataatccctcattgcctttccatcatcatcccagggaatatttccttcccccagtttcattgcccattacttgcccccctcgatttgcccctcggctttcatttgcggctccgcaatccccgcccttggcccgatgacatcacgtgaatgacgtcaacaataagaatggtgactaatagattccccacaggtctggcgtatcaaccgtgagcgtgctgtcgactacctgaacacccgtaaccgcatctatgttatcgatggttacgccggctgggacaaacgctaccagatcagcgttcgcgttgtctgcgctcgcgcctaccacgctctcttcatgcgcaacatgctgattcgccccagccgcgaggagctcgagcacttccaccccgactatgttatctacaatgctggctctttccctgccaaccgcttcactgagggtatgacctctgccacatccgtggccatcaactttgccgataaggagatggttatccttggtaccgagtacgctggtgagatgaagaagggtgtcttcaccgttctctactacgagatgcccgtcaagcacaacgtccttactcttcactcctctgccaaccagggtccggatggtgatgttaccgtcttcttcggtctgtctggtactggcaagaccaccttgtccgctgatactaagcgccagctgatcggtgacgacgagcactgctggactgacaccggtgtcttcaacattgagggtggttgctacgccaagtgcattggtctctccgccgagaaggagcccgatattttcaacgccatccgcttcggctccgttcttgagaacaccgttttcgaccccgtctcccgcgttgttgactacgatgatgccacccttactgagaacacccgttgcgcctaccctattgagtacatcgacaacgccaagattccctgtgtcagcgacaaccaccccagcaacatcattctgctcacctgtgatgcccgcggtgtcctgcctcccatttccaagctcaccccggagcagaccatgttccacttcatctccggttacacctccaagatggctggtactgaggatggtgtcactgagccccaggctaccttctcttcttgcttcgctcagcccttcttggctcttcaccccatgcgctacgctcacatgttggccgagaagattaagcagcacaaggttaacgcctggctcctgaacaccggttgggttggcgctggcgccaccactggcggcaagcgttgccctctcaagtacactcgtgccattctggattccatccacagcggcgagctggccaaggctgagtacgagaactacgctaccttcaacctgcccgtgcctacttcctgcgccggtgtccccagcgagctccttaaccctgagaagagctggaccgcctccacttccttcaaggatgaggtcaccaaacttgctgtcctcttcaacgagaacttccagaagtactctgatgaggccacccccgatgtcctcgccgccgcccctcaagtttagagggttggagcgatggttaagaatttctttttctccttgtttcttgttcttccaaacaggatgaataagtcatttgcatggcgtgctgctttattttgatgatgctctttggtcgccgacgtctgccgcttgtatcgggacaagcggatggatctttattgatttccccccgatttgggttgtgctttttattattttttgccatctatctttgactggctgggagttatgtagtgatattaatgaaacaatttattacatcatagtcaccgcaatggatcatacctcatttctaaacttattctcaactaatatgtttttgtattccaatggctgcttcttgtagcatccatggtggtattgtttgatgatccctggttgacagtgcgctgccattaaaccctcgtcaacgacgccttggatctatttgcacctacctggttatttcggtcagccatttcatgattttacgatgttcggttagacgcgttcgcaaggcggacttaacaaatatagtcagttgggtgatatcatcggaaaattactacagtttgagtcttccgctaaggcatttggggaggatatattgaatgacttttggctcaagcatagaaagtgaggtcatcgccttcttcactagtagactccagctggacctaggaacctcgtcttatgtacggttggcctaacccaaagaccaatagtcctttctgaattctgaactctgaacgatagaatgtttgatttgatgtatttctctatgaatgcttatcttgcttgccgcgaagctatcgacagcgcaagtgacttttgggcgaaatcatccctatcctttggtagacggggttagcatgcgaagccccgtattgatgatggatacaactcaggtgaaacggcgaaggcatggaaaagccaacattccgacgggatgcattagccgtcatgatgctagctgatgaaaaagtggagtagggtggttgaggctcgtcgatgcagttaggatcacggtacattgggtcttttcggattgtacggtattcgatgtggtggtccttggcccacgaggactttttctttgaatactctagagaaataagagcagagtcagctttaagaaaagacctaggttgtaccaagactgaaggtacctttctagattgaacgcaaaatgcaatgtaggtgataacgggtatgagaggtatgcttttgaagaaagaagagacggggagctgagtcaacaccaacagtcgaaaaacatatctggcccgcccaaacagaccatcgtgggggtaaaagaagtagttgtgaatccaaacgggcttgtagtatttaaggtgttctcaggtttggcaacttttttttgcgctcgacttccggcgtctttccgtttatattccctgttgatggcatccttggaggaaaggagttgagagagtgtcgaagctaggtcactcataaagttcccagtgtcttcttggaagtcggcaaaatcgttcctgaatttctcatgggacgcggcaataaaatcgcataaatctttgcgagcaagatcgctcgataggagcgtgctgccgtagataatccgaatcgtatctgccagagaaccactcgttgcgtagggcgaactcccatactctttcagaaaaggtccaaaagcatccttcattaggacacgagcataatcttgtaggtccataacaagataacgctgggcgaatgagtagaccttcgcgtgtagaactatagcatcccccgtatagcttcgagaagtcggtgaggagctggatgtagcatctaaaagcacttaataggttaatagtagagttattgcagatcaggtagactcactgtgttcagtagatgattttgttggttcttgtagtactgattttttcttgcttggatgcagttcccatggggtagtatatttctggaaatagcaaaattccagaacacaactgatagtttcttcatcgaaatcggaccagtccaataagtcttgtccggcaaacttccatggtccagtcaccctagcggttaaggcagatttgccttggatcagagcaccggggtggacatagaaagtggttttgcgttcccctacaacagcctttaacgggctttccatgtaaatgcttttcggccattagcacttgaacgaggaaaagaaagaaatgggtttcgtccagtacctatgaaccggtgtctcttcgactgagctcatgatggatgggatgtagagttgcaacaaagacagaggacttgagatggccggtgtcagaatgaataggaaggaggggagggggagaatgtcatgagaaatgaagtttaaatgaaaatcaggcttgagtgggaagactccgcagcaaactcgtgatgagcccaataatacgaccgcaaggaatgatagaaatattacgattggtctcacaactatatcatctttcgatgccccccaacacgccttgtcttcagcccagctccagaaaccagttctgactttgtctgtcgctgctgcgcatttcctaaaagagcttggattaccggtctggtgatgtcaataccatcagattctcactaataatctatcacgtaagaattacatgaaaggatagcgctcatagaagttagcaaggtcaattcttagtatggtcaggagtgtaaaaggaagctatacgccgtgaaagacagcttgttggctctatttatatgcattgaaggctatatcgcctacactcaaacccgactaagcccgatccgtgcttgttaactttgtaaatcgcgtacaatttcatatgggtttagttggtgtaaatcttgtagtaagactcgctaaggctctctttgatttttatcttttctataactaagcaagtgaatctagcaaagtaatacaactcgtaaatgtttacagcctaagtaggtacatactgactacaagtaggtaccaatcaagagtgatgcaaatcaaacggaaggaatcaagcagatgtgatcgcgggccccgaagctcagaaagatcttgcgtgtggcaattgctaccaaggcgagagaaagaaaggtatccctaatattgagatatcaaggcactcgtccaccactaaagaagaaacgattctgctgtttactcggcagctggtagtaacatcttctccactcagcaaggtaaccgtctttcttctcacatgtcttttgcaggtcagccttggaggactgaaggagagtaagctgagccgaaagttcgcaagctagttcagtcataaagtcctcagtttgtttttgaaattggggaaggtaatgagcgaacttctcgtgtgacgaggcaataaagctgcgaagcgcaatgcgagcagcatcaatgttagtatctgacgagagcgtgcagctatagatgatccgaaccgcctccactagagagagacttgttgcttggggtgaagagctgtattcttctagacaaggcttgaagcagtccttcatctgagtcagggcaaaactttgtagctcatcgatgagataatgctgggcgaatgagtagaccttagcatgtagcactatagcatcccctgtgtagcttcgggtggcaagtggggaaccagactcagtatctaggtgaaaagaagcactaagtaagctgagctcctgggccttcaaactctaatcaacttaccttcctgagcgtctagttcagtcaacactagctctggctctggattccccgtgttcatagccgactgccgtgggacatcgtattgccggccatgaaagaatctcagaacgcaatcaatggtttcttcatcaaaataagaccagtccaatgtttcctctccggcgttcttccatggcccagtcaccctggcagtcaaggcagatttgccctgtatcaaagcaccgggctggaaatggaaaatggttttgtttttgccaacaacggccttgattgggtcttgcatgaatatacttttcacttatcagtaatagaatagcagtggaaatgagatatggcggtacctttcaaacttggttccttctaccgagcctatgatgaatgccactcggattttcttcagttagatatgcttgtggttgacagagaaagccaggggaacgaagagggtccttgtagataataaggaagaggaggcgctaatggaaccatgatagaaagatgaccgtgacaaccacatggcaaatatatatcaactatacgattgatgcacccatggaacctgacaaaatgatgatgtttggatgcatggctgctataatgcgcgtcctttgtcaggtcagtttcacgttagtttgaccttgctttgtgtatgatcctcgcccccaactagataagtgaccaaagacacctgaaagattcaaataaaaaggaactggataaagatgccaaagggtcagaggtcaggggtcaaagagaggtacgtagaacttgtgaatagaaaaagaaaacctcaatcccgctcctacaactaggcccgggctcctcaattcgatatccgtccagaaaagccgtacgaggaacgttcccgaactcctatgccggtaggccgtgggtccaaatataggcttgaggctagtggggttcccgacgtgccgagaaccctttccacggaatgaattgggagtgatgatgcgcttttagggtcgagctaggcacggagtggattccgcggaagacacacctacatttctagaatcggaagggttagaataatagcgctggtcgacgttgtttacaaggaagtgacggagtttgttgtgtatggcggtttccgagactgtgatttcttttttgtcgtagaataatgcagatagctgaatatgttcattgacatggagaggtccgtggctaagcgcatgaattgtttggcggcatttcatctccgttgtcaggacttaatttaaaccggacctcggactctgagagatgcaacgattgaaacatggggcgggtcgtaggtcgtacattattaccgaatgatgagatccgatactaggtgtcttttgcgcactcacggttagcttagtctcccttcgcttcgcgaacctttcaaccctgccaattcgaatagaaaaaaagcgccgtctattttccgtgccatattgccatattgagaacgagtatccatgcgtgtgcattgttcgggaaacagacctccgctgactctgaccgacttgctcggtccttttgaaacgacgttgaaagttgacgacttatatccgtaatcgtcacaaaggaccaataccatgaagcagatgcaacacagagacggtgtgagaatccaccccagaagcttactgtcatatttattgccggtaatcggcggaaaagagccagagacaggtcaaaccggaggaatctgtgatgactggctctgtcaacgcgacaataagtagcgggagccgcaggtccacacagggaaaagggggatcatttaggatctcaatggatgagattggtcggcggccaggggcaggttgcaaggacggggcccaccacagcgtcagcgaaatgatggtcggccgattggactgccgaacatagtcggatcatggcccgagggtagcggcaaaaaattaatgaggtggaatagccggtcagattggattctagacactgggactttgccagggccctcgataataaaaaccgagtccgatatacggctaatccgtgcgtattgagtccaatgttcgtagagttgatcccgggagattgtactgggaataacgtgcggcctgcgtttttgaacagggtatataccggacattagcagaatgtgtaggtataagtaattcgatccccgagatatgcccggagaggttgtctaagcggtgtcgggtctatctgtatggacgggatcccgataagttctcgtggggaatccaaaagcggcttagcgttggtggggattccggatttagctcgtactcgtactaatatatatctgcctcgttgatgtggttgtagggcttcgagggggatgaatggaatattgacagtctgttctatgttgggacaatattggacacggctctggaatattttatacctcccttcacatagatataggtagtagatggcacgtttggcgaattcaggatcgtccatcgaccccccgcattttgacaagctccatagcatgtccacattcgtgcatggttaatcgaaatcatgtagatatcattggtccaacacgcaaatccttgtgtggagaggcctggttctggcgactttcgctccatacggtccaacaaatgccagactttatttccgtctattgtctctcatcccatacatcctgagcggggaatccgcggatagccatcggttgagcgtcggttgaggggtcggttgaagggcaataacctccggttcggaacgagtttgcggctgtgtagattgacttggacatttgagcatattagaacaagcgcaggcccccattgtcccggtttgaccttgtatagttgtaccagagtactcgactctacacgacataaccaccccgcaccttctctgtcttgtgacttttcttgtgtctcccctcatattctcccttggcctctgttctctgttctttgctttcaaatattgaccctgtcgacacctcctgtcctgaatctcatataaaagcaacactacgtcatcggtaagtaccatggtccaagatcgtggacagtccccgtggcttccaaatccaccaaagaggatcctgctagtctcctgcaaagggcatctcccgtgcttcttgacattctcctatacatcgtgcattgtattgacctgcatctacagtaggacctgaatacttcactatggcatccactctcaaggatagggccgccaaccatgctgctgcttctgcggaaaatggcactgagcccgaagctcctcccgacctcctgcaccagccgtacgtccgcgccgtcctgcccttcatcaacggcggactgtccggtatgaccgccacagccgtgattcagcccgtcgatatggtcaaagtgcgcctgcagctcgctggcgaaggagcccgcactggtcctcgcccatccgccctcggcatcactcgcgaaatcattgcctccgggagagtcctcgatctctatactggtttgtccgccggtatcctccgccaagccgtctacactactgcacgcctgggattcttcgaaacatttatcaagaagctcaatgcccgcgccaaagccgcagaccggaacgtaaccttcgtcgagcgtgctgcggcaggactgacggccggtggagttgcagccatgattggaaacccggccgacctgtccctcgtgcgcatgcagtccgacggtctcaaggcccccgaggctcgtgctaactaccgttccgtctttgatgccctcgctcgtatcacccgcaccgaaggaatcggtgctttgtgggctggtgcttctcctacggttgtccgtgctatggccctcaacatgggacaattgactttcttcgccgaggctaagcagcagcttaagcagcatacttccctctctgctcagaatcaaacttttgctgcttccggaattgctggcttctttgctagtttcttgtctctgcctttcgatttcatcaagacccgtctccagaagcaacagaaggaccccaagactggcttggttccttacaagggcatggtggattgtgcgcgcaaggttgccaaggaagagggttggttgcgtttctaccgtggcttcggaacatactatatccggattgctcctcatgcgtcagtcccccactattttaccccaactttcccccccactgactcgatctacagaatggttaccctcatcgtggctgattatctcaacctcctcaccaagtaaacttgctttgaaagcctggattatcggtcttcgttcttttacattgctctccgattacacgatatcgcatcgacacgctcagttatgcgatttaatactctcagcacgccacagggtctattgatagacccaatctgctatttttaatatccatgggaagcgcagcgtccgggggaagacagccaattcaactccgagacactttatactccgtttggccgatgtgcatcgcacaaacctataatggcaaatcacccatggtagatgtggttcgacattcggaaaacatggtaccggcgaagggctattgccacatacaatttatttttctttgggaagagaaaatgtcggaggatacgcggccggccggtcttctccgcggaaagccacgacaacagaatgcaaaacatagtcttttgtcacccccttgctcgttttcttgttggtcggcttttgttgtgtttcgacaagcgaataccctcttgtcttgctctgttctttgcctctatacctctaccatactttatgttggtcttggtctgctttagatatgtagttaggtagtatcctcagcggatatagtgtttacttgcctatttctctcgttccattttctccgatagtaaaacattccaagatctctttgtcctagatatggagtagtatgtgagcctttgcactgactttgagcattcgaactttcgagtttccggtgatgactatcatattttctaaattattgtagttaagaacaggtaagttgtcccattgtgtatgtgaatgtattccatcctaacgccgaagcagaaggcaggtcctacagaataaaagcaaacaagagatagacatcccatcgtgaaagtgaaactattcaccattaaaaccgacatcgtaaaaacagaggcccaaaatgcaccactggcagtaggcaagccagatggccgtggggaatcacaagggtacaacgtgaaaaggaataaaacagaagatttgttcaaggtccaaacctgagactcgggaccagatccaacacagcccgtcgttaaaaaaaataaaaagagaaaagatcgcatccagtccacttctcttccgagtccatattagttccgattagatcttctcctcgccaacacgctttgactcaacagcgccaagcggcagcacgtcctcaagtgtctcgtcagttccctgaatatcatcctccacgggaaccgagtccttgatcttgaaaaagacaacagggacagcaatgaggatcgacccgcacagaagaccgaagttcgaggcatattcgttcatatacggcagcttcttctcgtccaacgaccacataacggccgcaccggcggattgcagacccttgtagaagcctgccaagttggcgagcttgcgaccggagttaccgagggcgcccatgatcctagaagaaacaatgttagtcagcatgtcaggggaaaagagggagggattcttaccagtagacaacaccctgccaggcagcatcgtacatgccgtagaagaagtaaaggaacataggaccaacgtagcccttggtagtccaatcccagccctggaaacctgtgattttcgcgtccacatcctcacgggtgtacctcctctgccaggcgtacccactaccccaaataacgaccgtgaggatgaaaaggccgaccaaggctgccctagcacgaatagtacgacggacgcgctccgaatcaagcagagggcccatgatacaagcggccacgatctgcgcaaaccagtacaggaagccgttcagggccttggtgcgcgtgttgaagtaggcgccgttgatagagttctgctggtatgtgtagaaccagttggaggaccagaacatggggaacaggaggacgatccacggctccgagcggactgtctcccacaggccgacgatctcggacttccaagaggggtgcttcatcaggatgacgcgcgagccgtcggtacgcacaaccttgtctgcgtcacagatgaacagagcaagacaggcgcctgcaaacatgagtacgataaaggcgatgtaggtaccgtcgccgacagtcttgtttgacgtgacgtggatgttttggcccaggggaatctttagattgacattgttagttgttgttgatggatggtctagccaattgcaagtatagggctaggtatcaggggctgggctggtcttaccaagctaccgatacaggcgccgatgttgaagatagcccagaaccaggcgaagtaacggcccttctgctgctcagtcgggtaggacatcatgatggtgccctgggcgccccagagtagacctgcgcagacaccgaggaaggcgccggcgaagatgttgaaaccggggacatatcgatgctcggagaccaggagactaatggagtaaatgcagtaaccgattccaccgaaggagagagaaagacggacgccgacacggttgacgacggttccggcgaagaaacccacgacggcgaaggtactgttcagggcgatgttctgttgttgacaacttgttagattgtgcatatagaacgcgacccaatcggagtttcggagtatcaaatgggaagagtggagacgagatagagaacaagtgccgaggtccaatcataccattttgtcagccaagcttgggtcggacttgccaccaccgcccatcccgctcaaggcgttaaacatgcctgggcagaggaagcagacaaaggcgaccatacccaactggatgcgtggcgaggcataccagccggtagagaacttgccgatcttcccagacttgtacatccatcctgcgggtcggggtatgtattcaggttcggaggaagattcgacgggagtcttccgttcatccattatgaatgaagacggagtgatgccgcagaagaatagacgataaaaggtggatgtagagaatattaaaaggtgtgtgtggtgatgaggagagaagatcaacaggaagacatgggattctttaaaacaaaaaaaatcataagatagccagcttgtacaatgtacccctgccactcgaagacaggtataggtactgagtccagattacaatgcagagatagatgtatcaacagccaaaatagtgtatgttgcagggtagcattgggtttggtcacgggctggagctagctttatgtggctggccttagggaaaaggataggcttagatattggtggtagatacaattggacaggggttcttatttgcggggagcttaggtaggtgattgggggccaggacgctttgatagtagtgttacaccgggatggcactgtgtctttgctctggcaggccttaagaataactggggaaagagatgtagtatttgtaggtcagcgacgttacgacgggggctaatatagagttagcgaggattagagtcacatcccgtgggaaaaacggaaaatcccaacttggcagactatcgcgagacttatcgtataagcgattaaggagaaggaagggacgggtgctgattggttggctggggacccacaggcgagtccgctggttcaactgcggggagaggccaaaagaggactagcgcaatcattcttgtttcggaattttggcacatttttgacatctgacagtcaccacgtttcttgatctatagttagtcgcggtataaatcggatggagagttgatttgcagagatacagtcagcttccagaattagtatcagaaattaaattccggaactttggtctgaaacgtttcattttcggcttgaccgaagggaacttcatttaaaaatgtgaaaacgtaaaagcatatcagtcgctgtcttggctttcatcctcggaccccttctcgatcttgggttgaatatcactatcactgtcttcactgtcgctgtcgctgttgctgtcctcgctatcctcgctatcactatcctcactaccctctttatcctgcgctttctcattcggcacatccgcttgtacgtctttctgagcgtccgcatccccattctcttggttctgctctttctcgttgtccgcagctatctcaacctcttcattccccgtctcctcaatttccacttcctcgtctgcttcttcattctctcctgcatcctccacattctccgtatcctcaatctccgcatcactctccgcatcgctgcttgacccgtcgtcggattcaacggcccgagcaacctgactgagcggctcctgtttgacacgctgtgaggcttgctgagcatccacatccatagcatcgtcatcgctttccgcgtcactacccaacgtaatgccggtacttcgatccttccgctttctcccatcaccttcaaggtgatcgtcttcatcttcgcgctgctggagctcttgggcacggcgaacccgtcgtagtagaacaggatctggccgcaaatcatccgcagtcaacggagtagaacaaacaggacatttgaccacacggatgcggtgctggccccgacgagatgccgggggcgcaatagtcgtctggctgcggctgatcatgtccataatggcctcccgctcgaagctgtgcggacatttggtgctcttcacaggatcctggtaaagtgtgagagtcaatgggcatttgagggagatgcgctcgcgctcaatggcaatgtcatcgtcggagccggcgggcgagacgccacggttctggtttcgcgtacgtgtcgatacccccgatcgcacattcctatcttccatgtgctcaaaccatgtagaggagtgtggcaacggtgggacgtcgtcgccggggaacttggagtcgtggaccatccggtagaagccaatgtagttgttattgctggcatatctagatcgtagttgtcagtatctgagccgtcggataaaacagccaatggctaggaataatctcatacctctctgtcaaagatagctcctcccacttctggactccctccgtcaacttatcgaccagcttgcgactaggcgggttctgtgcattgcgctctcgcatctccctctccagcgcatcttcagaattaccatcgttgggatcctcagtcccatcttcatcatcgtcatcattggctctctgccttgtccgctgttgacgggtctgtctcacccccaaagcagcagcgacattctcaccctcctccctttcaatttgacccagcacatcggttaacccctggagcttgatttccgaatcgacaatcagtcgtgtcttctcctccatccgcgcagtaatagcactgactcgagcctctgcgtcagcaagccgctggtactcctcattggactcgtcgtcgtcgacattctcttcaccttcacgccgacgcgcttctttatttttctcgtatcgtccccgagaatcgctaaggcgctcatttacttcaccacctgagtgtgtgagtttctcgacggcatgttggagatgggtgcgaaggttgcggaggtgatgtgatgcgaggagagctgcgattttgcgctggctttctgctgtaaggggtgcctcggggacctcatattctggcaggggtattgcatctgagactgaggtatggcttgcgtttcgtctgtgcgattgtgctgatggtggatgggactgagattgcgctcggcttggtgttgccgacattgttgcggggggagaattcttgtagtaggtgagttggcgagatgcagattactaggagtattatgctttgattcgggtacagggcttccaagccgttgacaaagaaagtccaagtaacaaagcgcatctcgaaatccggacgcgagacgcgattacgctagtcctgtttggggttgcgtataccaacgataagccttatcactatagaacattggaagtactctgtcttccccgacatactacattgtgacgactgcttagaaaaacgaagtcaaaatgagatggcttaatcatacacagcttcccagcaacaaaggcttcttgttttataaatctgcatttgctctgaaactagttgcaaccgttagtcccactctaactgccatgtcgaagatgcggatggcttggcgtccgtacacacatttgattcaacacagatctgcatttactgaatagtataacgaagcaaccttatgcagcgctatcctctagcggtgcaagtgccgccgctaagagacccagtggctgcttacccgcagcctataactcgatcatactccacagtcaaccccaagagcccacaattgacacatgaaatcctgtcataccctttttgggagtgagtggatatgcccgtaggcaaggttctcttgggaactgtaatcatcaatcgtgccatgcaagtgattgagaactattgttatttgacaagtaagaagaagaagattatttggaattgaaatacaaatggtgagcgaggaagagttcacaatgaaacattaaaagaatccatgagcctataccttgtagaagcagtatgcatggtagaagcctagcgatgtcatctgttagcaactgcgaaaagcaatacacatatggatattactcactgacagcctccttctcttcctctgtcatattcaaagcaccagtcgcgcggtctcttacgcccatgcgatcacccagcgggcccagctcaggatgattcttctcatcctcccaaatatccaaaaatggcttgcggtattgtagttctaggttgtaatcttcggtcaggctgggttgaaaagttagttatgcatggcaacgtgatgaaagtcggaactcacgctcggaaagcctcccagggaacaacgtattcgggaacctcttctactgcctccttcatgaagtaactgtacttccacccgaacggcggacggaagattccgtcttcgggggttgcgccagggaattgaacgcgatagatatcgttgccccactgggcccgctcatcctcttcgacttcaccatcctcggggccttctggttcaacaggtttagcagcctcgcgctccttgcgcgccttatggaaggcagacacgcggctggtaatgacgtctgagttgggacaaaccccaaggaaacgaccacctttcttcaagcaacccgcgacattgctgagcatttggcgtgtcttctcctcagactcaaaggcgtagtgaatggcaaacatacatgcgacgatgtcaaagcctccaccgccatagcgagaggccatgatcgatccaccgggcccggcattagcatcgataccaacccgctggatgatgtcgatatcgcccagccactcaccaaagcaatctttcggatagaactcggcatggaaaattggctgcggtggtcgtcggcctcgctggccgcggcccgagcgcatttgatcgtaccggccccgcgcttgctcaattgaaacattggcaggatcaagaccgacatagaggtcaactggctgaggcgccagctgccatttgcctaaatcgccacccttaccacagcccagatccagtacgagaagcttttgattatcaacaggcggcggcccttggctgtcattcgcccagtccttgctgtcctcaaatcgcgcgacaaatgtctcatccggggagaacttctggataagagtactcttcacccagttgttgaagctgcgtagccccttgatcttgctctctgtcttccgccactcacggcctctctccggaaccgcgttgtagtgttgtcgaaccacatccgagataccgcgctgctgagagttgcgcatagcctcatccacttctgcgcgctcacgttcctcctgtttgcgtcgtagtgtttcacggtctaagaggccctgtcgtgctccgccgcccggtctcttccgttgacgcggtgcatcgggggagggagagcgacgtggctgtagtggcgatcgagagcgtcggtcttcgcgtggtggagcgccgcctgggctgcgagagcggttgcgtcgcgagaatactgacggcggagttcggccccgtttccggagggcttgatgtctctcctggagtcttttgcgcttggatgctgcgcttgatacatgattcgatccgtctgccgcagtgtctccttcgatgctcctgtgtctgccggtatctgttgaagggtatgtggtattcgtgcgggcaggcgagcgaggcgtggaccgcccacgagctgcatcacgagctctatctccattgggatgatccatgctgacgtgagtagagttgtgaactgtttcagaagtgattcgggagaacaatggtcgcgggatctgtggaggaaaagaaggaaaggtgtatgccgcacttaggataagcctaaaagaaatatataattttaggttgatttcacagaaatgtcgcctgcggagttgtgaaagtcagagttatatcagagtaatggccagctggaggtccagagaaagtccaaagagctccggatctcggccaatcagagagttctaaaccaaccctaattcccattcatctatctacaatctttcaatggattcttagattatgatgtctagaaatgaatgagatagatgtattctcatatttgcgaagtgtcgtgtctcacaatgatcataaatcgaagctatctgagaaaaaaaaaaaaaaaaaaacacaagccgctgaaagacacactttgaccctcttcataaaacccgcgctcccaattaatgtaatattaaatagaaataaagatacgaatgcaagatcattgaggcaagacagctttccgttttggtgacttagccgtcaaaacctgtcttactcgtcgaattttcgcccaccattcgcggtccgctttctttttcgcatccgcattttcttcttggcctgcagtctcggttggtgtgcataggtcggtccgcaatgtatcagtggaggccatggtacgaactctgcggcggtgtttgacctttacggcctccgcgacgatctgccacccagcacgtagttcttccaacctctcgttgggtcgcccagtgccactttgggctaccttgtcgatccagggacaatactccatatgctcatcggccacattgagggaagtgtagacggtgacgtctccattatctttgggtttgtacatccataatcccaggcgacggaaacacgctccacatccgactaatcccgcagctccatcggaggcagtatcccagccgagcaatgctaacgccagggcagctcgattgacagctttggatgtttctgttgagtcttggttgtcaatgtctgtaggccgaatctctccgttcatggataccgcagctttctcggtctctttaaaccattcgtccggaagtcctttgataagcacaccaaggtcaagcccttctggagtctgaatgatatcatcagctggtaatttatcgcccatttccaagatgtttgtatatcgcgtgtgaaggcccgacagggcagtatcacaattggtcaaagggagatgttggatagtggctaatctgatgttagtcataggacaaaatgttctcagtcttatttgaactcacaatcacagctcttgtttcgccagggacagttttcgccgtgagcattacttagcatttttgcatactcatccaccagcctcgcacctgtaggcatataggttagtataaaacctcaatcagctagatcagagatctgttgtattactcacggacttccttccgctcctccaccttttcaatgttgaaaccgtcgagctcatcgatttcatcagggagcttcacaacgactgcgccgccgcaatcactcacgcaggtgacgcgcatgacgtctgtacagatccaaccacgcttcgcccattgcacttcattgatcggagacggctttgatgtccatcggtcgacacggcggaaggtctctaaccgctcgagaaaacgttcgcggtcccaagggacaaaggttgggcgcttattcaaatttgcggaggctattcggtgccctggtcgcgatatcttgtggattgagttgcgtaccgctgtgagctccgaacggtcggcgctggccaagcgtactttcttgatcgataagttggcggagagacggtcttgcgccgtcgcaggcgccgtaggagctggtttaggcgcgttgtcggacgtaagaggcttggatattgattcgagaacacggtggaacttccgcttctttgattctagagcgtaggacatattggtgctgggctgagaaggaagtcaagtggtgcagatcaacacaacgcggagagggttggagctgcggcgatcataacgcccgaatgtgtatcagcctgaggcaccaacatcgatattaggcccgtacatcgatactcagcggtcaattctaaatcgaacggtatggatgtcagtattctctcaattagaaatttaattctactgtcaactgttgtacactgttgacagtgctattccactccgacaaatgctccactgctgattggctaaggcattccgtgacatcgtacaatcctccgaacttcaccaactttcttccttcactcatctgccttgaccatggcttctctgaggagctctctgtcgctatggcggagtggtgcgcctcgtttggccaaagactttttcacatcccaatgcctcccaagtcagggctacgcagccaaatcaatccgccaattcggtgccctccagttccgtcaacccagcaagattcaatcgacccttctgaacaataagaaattcttcacctccagtatcaagcattcaaatgccgcaccggccattgcagaggcggtggaagaaggcacaacgaaaggcaaatcgagcttccccaaaattagcgacaagaccgttgcctactggctactaggcagcgcggccagtgtttttggaattgtggtcttcggtggtttgacacggttgacagaatctgggtaggtggaccgaggtgcttgttttccacgaaaagtgagcttcgaatgctgacggaacatattctggcacagattgagtatcaccgaatggcgacctgttactggctccctccctccaatgaatgcggaacattgggaggacgaattctcaaaataccgcgcctctcccgagtttcaattgcttaacccgaacatgactctatccgagttcaagtcgatctactatatggaatggattcaccggctctggggccggtttgttggaatctcatttgtgctacccgcagtctattttgtcgctcgaaagaaggtctccacgcccatggcgtggcgcatctttggaattgctggtcttattggtttccagggattccttggctggtggatggtaaaatctggcttgaaggatgatctctttgctccgggcagtcacccgcgagtgagccaatatcgtctgactgctcacttgggtgctgctttcgtttgctacaccgcgatgttgtggaatggtctcgctattctgcggtctaatcggttgatggctgacccggctgctggaatcaaccaacttaatgcgctgcgcgacccgaagctggccttcttccgccgctcagtcgctggtattgctctcttggtcttcacaactgttatttcaggcggtctcgtcgccggtcttgatgctgggcttatctacaacgaattcccatggatgggccaaggactagcacctccaaaggaggagctgttcgatgcccgctactcccgccacgaggaccgctccgatctttggtggcgcaacatgcttgagaatccttctcttgttcagcttgaccaccgcgtcctcgcagtgaccaccttcaccgtcatttgtgccttgatggcttacacccgcggctcccctaccatgaagcgcttcctaccggcacctgctagaaagggcgtccacggcgtgtttgcgtttgcttgttgtcaagttggactcggtatcagtactcttctctacctcgtgcccactccgcttgcctccgcacaccaggctggaagcttgttcctcctgacctgggtcataatcttgggcagccgagtctggcatccttcgcgtacagccaagctgttgcagatggctgcgaaagctcgctctcagcagctctctaaaactgctgcctctgctgtaaagagagtctaataatcctgcctctcgagtgtatgaatatgtcgaccagggttgattgtgttcatcgattgccttggtaattgataccatctccattcctctgttgactcgagcgattctcgagtcttattgtataactagaactactgctttcattgtaaaaaacatgttttgaactaaatcaaagtttattggttgatctacctaagtccgaaattgatatcccctttttggtttttttgttcccttttttctcttcttcttcttctttcttgcactttttacttcttcgtcctcatctttcatgtcttcacaattgcgtttcacattttcttactctcgggtttcaggtctcagtgatacttcattcctcttgccaggcacttactccgccaacttcgtagcaggtctcgcagcgcgcgcagggttgcggcgtgctatgatgtatccaacaggcagaccgtcctcaccaataggaatatcagactcatcgtggggccactcatctcccacaaccgacatggtcatatcagaatcagtggataaagtatcgacctgcggctccaagacctggccacgtgcaggagccattttctgtccacctgtattactttgcacatcgctggtggcactaggagttccgttaccaaaagatccgagatccagcagggttttcgcagccctcacatcggcagactcggaggataggcggtcttgagtcccatctagggatggcaaagatagcggcatatcgccacccccctcggggacatgaatagctccaaaggaagcgtgtgtatggtctccgtttcggtcggtcagacacttgcggcaaacttgccagccgcagttctggcagcgtgacatgccgttcttgttgcgcttgttgcatacgtcgcactttgcggtgtgggctgctacttctgagaagttaacgccgactcgccgtctctgggatcggtggtttgcggctgcatcgcggctcgccatttgccggccgttcggtggcacccggtttgttgagaccgctcgaatcgggttggaagagatcttcttcggggttgatgacacctgtgtgcttggaaatcgtggatcgcggagtgtcgtctgcgcggagttaagagtcgactgtgtgggcgctgttgatgcctgaactggctgggcttccttcagccgtagagggattggaggggcgatatggttctctataagatgggcttgtaagggctgagatgctggtttttgcttcttgtctttcttacctttgcccacgttcacattgggttggaaccccacggtagagacctattagaaagttagctatatttgataccctctatttttataaccatcattctgcacgtacgtcttggtaggtaaatccgggctctcgaaacgcctaacacaattttagaatgatatctcagggaaaagacggatggaacaaacattccggctggggtcaggcgggacaagccatccattagctggatagggtgggtacgggttgggaatggtattgatcttttgtggtgaagacgaggaactattgcctgttccatcgtacatgttgtcagaaagatgcaagctcggctggttgcgcttgttggcttcgacagactcgtcgagctctcgaaaagatgggagactcaagtctgggatgcgagggagacgcatggtacgatggggcatgattgcaacagaggtgtgctcgatggtacttgatgatatttgaaggaagagttcctttgagcaagaatgaaaaaggaagaggatggggatgtacgaaatgaaaatggaaaatggatgtggtgtagataaaaggcttggggttgatgaaggttctcagatgcaagttgtactgggcattgttatatacagtctcatgggatcggatgacgcctggtggtttgtggagagcgctttaggacaggcaaacagatcgaaaccttcgaaaatacaacacacaacacagttctactcgattaaattcagcagctgatcaacctctcgtcaatctcattatctatcttgaatcaagtacaaaaggaagaggtttgtttcgaaattggctgtatcgccgagatattcttgagaacccattttatctgctgcgtttatcataaaacagagaattgcatgcagcccccaagacgcatcgcacatcaatagcatcaacatcttctcgggcaatcacgtcattttaatcatttgtgggctgtatattcatcgtcagtgatatcggctcgtggaaatttgctgatattaataacatacggattccttcttcggggctaggctcgataccgacgacttcggcagcagtcttggggtcggcagcagtcttatcgtctttcatcatggggaaggtcaacacttccttgatgctgtagttgtcggtaaggaacatgacgatgcggtcaatacccagaccccaaccagcagtcgggggcagaccgtactcgagggattggcagaaagtctcatcaatcatctgagcttcgtcgtcaccttgatccttctgattggcctgctcctcgaagcgcatacgctggtcgaagggatcgttcaactccgtgtaagcgttgatgatttccttggtgctgtaatttggttagctaaaattccgcgaagactgataggccaattataggcagagcgaatttggaaagaacggggggtttcaagcaactagaagttgggtgagaacttaccaaacgaaggcctcgaaacgctcgcaaagaccggccatttgacggtgcttcttagctagtggcgacatcatctgggggtgaccggtgataaaagtggggttaatgcaagtgttctcgatgaactcgccaactagcttgtcgagcatgcgggcattggtctgaggagccgagcaatccacgttcatcttcttgaggacgcgcttaaggaattcgttggtctcctgagtgtgaagctggtctccgggggggaacttctcgccgcaagcctcttccaatgcagggatcatgtcgactcgtttccaagggccctgccaattgtaagtttcgccagactgagtgtggaatacggtctcgtaaccaccagtaacgtgcttaaccagattcgagacgagatcctcagtcaagtccatcaggtcgtacacatccgcgtaagcttggtagaattcgcaggttgtgaactcggggttgtgagtcaggtcaattccctcatttcggaacacgcggttagacttcatagaagaatcgcaaaatcgtatgctctcaaattacgtaccgttcgagaccacccactatcagcatcttgaggtagagctcaggtgcgacgcgcataaaaaggtctctgttgaggtcattgtggtgggtaatgaaggggctagccgtagcacctccggcgatagtgttcatcattggagtttcaacctcaatgaaatcaaggttgtcaaagtactttcgcatgtaggagacgatcttggctcgggtgtagaggatctcccgggagcggtcgttgatgatgagatctaggtagcgctggcggaaacgctgctctttatcctggaagccgtagtgctccgaaggaatcgcatgcaagcaaggggccagaagaataacctcagtggcgaagatagaaagttcaccatcgtcacggttcttggggttggtccgaccagggaaacccacaatgcccacaatatcacctctgcgaagtagctcgtgctgctcttcgaagggctttccggtcgagaattgtgcctggcacattacctggatcttaacaccctctgagcggatgtcataaaagttcagcttgttgccggaggtacgcttggtatagatacggccagcaacgcggacggtaacatcgggcttctgttcgcccttctggagaccctcataatccttaacgaatttgcggagatcggtatcgacgtggaatttgtgtgggtagggatccggctgcttagtttcgcgcagcttgttgatcctcttgctacgaatctcgaagtattgctagaacgacacattaattagcgtcgcaggacctaggaatcgacccaggagtaagatcactaacgttaggagtcaagttggcctcgtcatcctcggcagacgatttcttctcggccttgggcttagggggagcagctgcctccttctccttcttcttggcgtccttctcacgctgcttctggcgtctcttcaattcagttttggagactttctcgccggtgacatcatcgagaagaaggttggcaatggaggcagtggcctcttgaacaggattggaatccgccataatgtgtggttacagagaacaagaaagtgggatggtgggatggtgggataagacctgaatttttgggcggggatcggcacggcatgtgattggacgatttcctataactctggggttctttcgaccttcgtgactcacttagattgactcattcctggattggcgccgagatatctatgtaaataagatctttatttgaaaataaaaattatgttttatctgcgggaatcctacttcactttctccgttgtcaagcacctcacggatactaaattgggatgtagggcttagggcactggaggtatctaaaatagaccttctccaagcattgcaattcctcctcaaaaagagctatggaagcctggaagcctggaagctatgctaacacaatagcgatagcctgactacaactttgagcagttgctacagccttgttcctaggcagtgccactacacgtgcctgctttaaagtggctcgctcctcgcaatgactgtttttttgactggatagagtgctatagatcgtccgctatctgaactttgatattttggtttatcaggcattagttctgcaatctgggctagcttagcttactcaatagccaaatgtacagttcaacattgaagtacaacgccatagtatagtaagaagggacatagcgcatagcgcacagcaagatggtagggtagatactttaaaccagtaacaaaattaagtcacttttatcacatcaacttcatcatcgtcaacaactactgcaacaactgatccaacaactgcttcaaaactgctctatcattatagagggaataaaatatctagttttaatttaaattgtttcatgttcatgcatgacagagagagctatggttcaaagactctaacagtcaatttaagaccgcgattataatccacgttcgtggtcgagacccgacctgatggcagcatggaccttcggttcccaacataaaaaattgaaattgaacggaacccaggcccaaactctcccagagttaagggacagtcaacgttaccattccacgacatctttcttcgcgataaaaagggcagggaggctggttttgttctcactgaaagcgatatggaagagattgcggagaaggtatgggcagtctaggacgtcgaggagtaagagaaggatggtgaatgggccggttagctgaagcgttagggtggccactacgcagtgtcgactatcttccatctcttcttttgcccgtcgtataagcgagaacctcttgcatcccatattttttctatcattggtcattttctggttatcccaatcaatttgcttgcttttatttatactatccttgtctccctttcatttaaatacgcctaccgttctcttcatcatcttcttctattcacccatctcctcgacctcggccttgattctgatttctcatcctatctgctgatggcagttgatttctgtctgcagacttcgctttttggctatctgtttctccctgatacgcctcatcatctgcagtagctttcacttttcggccaacttggtcttgagaatcacgcttaactctaatctgtgtccatctgtgctttttgtatgtctcaccttgccgtactactagtgacactaggcatcacttcctgactcttattaatgatcttatggctaaccataactcctccagatttaatcacaatgtcaggcttgtatgatcgagttccgaagtcggaacccagcctagccatgtgtgagtctggttactcttagtagagaaggtcttctcgctgactagcctcttcatacctctagccggcttagctgttccgattccagtgtctcatggactatctgatgttccttctgcccatccaatccccgcctcctctctcgataatcttaccatggacatgaaaaatctggtcagaaaaattcaagacctcagtcacttggggattgaggacagcaagattatgcttccgaaaatatgtgtcgtcggtgaccaaagcaccgggaaaagctccctcatcgagggtatttccgagatcaaggtgcctagagccgaaggcacctgcacgcggtgcccgttagagatcaatctttccgaaagcgacgacaactggaaatgcgtgattcacctatcacgccgctacatctttgatccatcgaagcggatgaagatgcccaagaagtcagagccactaggaccatggattgcgcttggcggccaagacgatgaacatttcatcaccttggataacaagcaggaagttaagaaggctatctggtgcgcccagttagctatcttgaaccctagtacagattcgcaggattttcttcccggatctaccgacatggcacagacacctcaggttaagttctctccgaatgccgtgcgcctggatatatctggtcctggtcttccaaatctatcgttctacgatcttcctggagtgattagccagacagaacaagataatgaacgatacctggtcaatctggtggaaaaccttgtcaaagattatgtttctcaggagcattgcattgtactcctcaccctgcccatgacagacgatgcgacaaattccagcgctgctcgtctcgtcagggacatcaagggcgcgaaagagcgcacccttggggtgttgacgaagccggatcgccggccctccgacgaagcatttgaccaatggcatgagattctggatggaagcaagttcaagcttggccacggttattatgtcattcgaaacaatcctgatccacttgtcagtcacgcccaagctaggaaggaggaagagatgttctttgattcttcactgtggacacgggacctcgccgcattcgaagatcgctttggcacgagacaactccaaacggcattgtctgacctcttgatgcgtcagatcttaggatctttgccctccatcattgcccagattgatgagaagtccaaggcaattgatgaagaactgcaaacccttccaaatcctcccactgaggatgtccaaagaatcctttgggggaaaacttcagaccttgaaagaaaaattcatgaactgttcgatgggacccccagcatcgagcacggttcttcccagcgaaagccgctgcaagagcagtggaacaagattgttatggaccttcaaaccgcacttgcgaagacacgccccatcttggatgttgctgcgcagaaggaccatgaggacttggctgaagttgttgactcggattgtgagttacaaattttgagcgttagcacaacaacgccaaagaaacgaaagtcgcctgcgagttgtacccctgcatcggaaccagcaactccgagaaggactgtgtacagcacatcccacttcgaggggtcgaagtctgccagaatcagtctacagcagctcaccgaactcaagattcgctctaacacagttggtgtaccgaaccagcttgatccccgagcgatcgagaatttgaacaagaggagcgttgagcattggggaagactcatggagattttcctcaaggctacgcataatcttgtccacagtatgcttcttgaagctctggaggaagaatttgcacaatatcatcaaactgggctgtatcaggaacttagcagatttctgaaagagttcatgggcaagctgcgccaggcccatcttcaaattgctaaggattattgcaagtccgagcgtgagataccgttcacaatggcccaaggtcagcatcaactcttgatgcaacagacttcgaacgtcctgaaagctcgtcgattcaatactcgcgcaacttgctggctgaaaattcgtggccatgataacgatgacaagatttcggagaaggtgaagaggatccaattagagcaacttggtcctgatagatactcccaagaacttgaaatgatggccgtaagtcttctagggagatttgctgacattcactaattgcggtcatagagctcgcttgcatactacgatatcgcatcttctcgtttcctggacgtgttgtgccagtctactcacatgaagttgttccgggcttgccgtgcaagtctcgttagtactcttcgtgatgaccttgaaatatttggcgacaacggtgagcatgcacattatatgtgtcaagtatgagattaaaaaatgtttctaatacgtaacttaggtcgcgcccgctgccttgacctcatgacggaggaccctgagcgccagcatcgccgtgctcagttactgaaagagcgggagaagttttcgaaagctcaggaatggttggactctgtccgagattcggatgtcgagatggaagacgaccaaactgctgttccagacatcaaagaggactggtgattcctcaaattgtcgtttcctgtggtctccatgattttgccatttacactggtattgaatgggccaaatattggcttgaggggaagtgttttcggggagttcctgtgagcttcaatactgtttcaaatgtgatggatgggatggagatatgaatcaaatggaggaatggaaagatgtcaacaaggactcctgaaaatcgtgtttgttaggccgcgatgatcgcgaatatacttgttcatacctttcccgaatttgataccaaacatttcggggatcttggaaggattgtaagattttgagcaaggtgtaagcattcgtctctacgctcgagtttggtaggctttggagctaattccattggccgtcgaatccctagttcttggtggcctataacaagcttttgagaagatgcgagtagtatacaaaggtgcactgatatcatgccttcagtcttcttgtgtctggagaaatgaaggcggtaagagtgtatcgtaccgcctttttgaaaggggaaagggcacccaacgatcccaactgctcatttgcctcgagccaatcagcccttttttcataccagtcaaaacgcaatcaggtgtcttcgcctacatcgggtgctctattacatctaccaagacccgcgatgacacgtcgggcagcaaccctgccactgctcagaggcaacaccacattggagtcagcgctggagcaagaggaggatgtttttcttgacttagattacccagaacagcgcattgatttcttcgtgttactgtacagcaatcgtgatgatattgagcgtattgcctcatatcatctcggtctaggtccttcggatacttgcaggactggcgatgtaaaggaatgggcccatggcagcttcaatgtttgcattctgctctatgtcagtaaacaaggtcaatatctaggaaagcatgctctcattaggtttcctttgccctacaaaataggagaactcaacacccccgacaatgtggacgagaaactgcgctgtgaagctgcaacttttatttggatacatacgcactgtccggaaatatccattcctcgactgtgggggtttggacttgttggaggtcaaagtgtacgggacctcaatggatattggccaatagtattacatgacttctaacatatctttacatagtttacaaaaccggagaatatctctctcggaactagacttctctggactctgaaaagatctatcatacggcttatagggttctctctaccctgtccctatatatctcatcaacgtcagacattactcgaaactgggtacttggtgattgactacattggcaactcggaagttcaaatactttcagagacatgggataaagactgtcatgagcaagtcataagaacaaatctttttcgcgggctttcacggatgatgctttctttaattcagataccactcccccgcataggttcatggaccctcgactgcaatggagttttgcaactttctaaccgacctcttactcttcgactctattaattagaaaacgggggaattccgaccaacatcagtcgaagcctgacctactcagcagcggatgcatactacctcgatcttttgtcttgtcataataatcgcatacagtatcagccaaactctataagcgatgcggatgatggccgggtacagatagcaagattgacgataatgaaagcgctcctacctcatttttctaacaaagcgcttcgagaagggcccttcctttacagactcactgatctccatcctagcaacatatttgtcgatagcgattggaatgtcaagtttgtgattgatctcgaataggcatgctcactgccagcggagacgttgcgtcctccgtactggttgaccggttgttcagtcgatgaactaacaggcgggcatcttgaaacctttagtgaggcctacgaagagtttgtgggtatttttgaggaggaagaacaacagttttcccctatcaacaatgaccattcttataggacaaatcttatgagaaatggttggcaagtcggaaacttttgatatttccatgcattggacagcccgaaaggtctattcaacctcttttctcagcatatttaccccctttttgcaccttctagtcagtcaaaggacgattttgcacgggttgtatcggacttctgggctcccgatgttgaaaaggtgttagctgccaagcttcgggacaaggaggaatatgaaaagacgcttcgccaaaggttcgaggatgctgttattaacgagaaggatcgggattcagagcattaagaggagtttcggtgtttctaacttggcaaaactcatgtatcagaagacctttgggagttcgactattacgctggagtttgatgagaaaaagaatgttatataatctatgctcaaacacgaattagggtgaatatgcgacctccgattgaataactacccttggccaagccctaactgtcctcggtcaggttgtataggaactgcgaagggcacgtcattgaaaggttctcagattccactactccccaactgtcgagatggtcagagattgtcaataaaatagccctctacaacgggtagtctacgtaattcaagacatatatcaaggtaaaaccgttgaaaaataacgtaaatgttataaaacagcgaagcattccagtgtgcaaggccggaaagagtaaaatgttgtcaggtgccccaccgaaagcgtcgtcttggcgtttttggggagcttcggggtctgtctggccttttggattcttatgattctagacttaacatctctttgcataccgttatgcttcatataccaatgcgtgaaaatcacaataaccaggcttccactaaggctgtgatcttggtgagtgacgaaatcatcgcaataaacaataactgacaccttgtccacaggtcggaggcccctcaagaggcactcggttccgcccattgtcgctcgatgtgccgaaggtatgcatctacctctgatttgatcgttcattggaatttgcgccggacaaaattgacaccgcaatccccatagcccctattcgaagtcgctggccaccccatcatccaccactgcctgaaggcggtggctaaggtccccgatgtacgcgaagtgatgttggtcggatactacgatgagagcgtattccgggattttatcaaagatgcctcgaaggaattcccccagctccgcatctcctacctgcgagagtacacggcgttgggaaccgcaggtgggctgtaccacttccgtgatgcaatcctcaagggcaagcccgagcggctgctcgtgctgaacgccgatgtctgctgctcattcccgctgggcgagatgatgcgcctctttgaggagaaggacgccgaggctgtgatcctaggtacacgagtttcgaacgacactgcgacgaactttggatgcatcgtgtccgattcccacaccaaacgtgtgctgcactatgtcgagaagcccgagtcgcacatctccaatctgatcaactgcggtgtttaccttttcgctaccgagtgcatcttccccgccattcgcagcgccatcaagcgtcgcaccacccgcccccgcctgctctcgtacccctcctccgacaatctggaatcctccttcatagccgccggggacgacgaggacgccgagaagagcgaggtcctccgtctggagcaagacatcctctctgatctggccgatagcaaccgcttctttgtccacgaaaccaaggacttctggcgccagatcaagtccgccgggtctgcagttcctgccaacgccctatacctccaaaaggcattccaggccgagtctcctgaactcactcccccttctgccaacatcgtgccgccggtctacatccaccccactgccaccgtcgaccccaccgctaagctcggacctaatgtctcgatcggcccgcgtgtcgtagtcggcgccggtgtccgtatcaaggactcgatcgttcttgaggactccgagatccgccacgacgcctgcgtcatgcactcgatcatcggctggagtagccgtgtcggtgcctgggctcgcgtggagggcacacccattcccgtggccagccactcaaccagcattgtcaagcagggtatcaaggtgcagagtatcaccattcttggcaaggagtgcggtgttggtgatgaggtccgcgtgcagaactgcgtgtgtctgccttacaaggagcttaagcgggtatgtgttatctcttgttttttccatatgccattgactaacgtttcctgtaggatgtgtccaacgaggtcattatgtaatatgagttttggtcatttttggttgatatttatcgccctgatctcctcgttgatacggcttcattgtcgggtttgtctcatctcgtcttatcttatggttggatggttatttgcttcatgagcgtggccgatctaaggatctttttgttttaatctatctagaacgaacccaaaatgaaagagtcgttggatttttttgcattactatctggtatatgtgggtttcgtttccctcgtataattgtcacatatcccagtaatcgagcctgagccctcgaaacgccatgcacccgaaacacctgatacaaacgttcagatataacccccagatgaatatcatgaaatcccgcatgttgtcatcaaagcaaagaagaagagaagaaactccaagtaccaaaaaccactcagcgatacatagcaggatcatacccagtattctcagcctgcctctgatgtccatcctggtcataagaactaaagtgcactcgaggggcggcacggtgattcatcccgggcgcatcatgataataattctgcgcctcaccagcaggcgcatgctccaaattgtgctcataaaccgggggcgcttgatcatggccgtggccataggcaccgtgcatcgcggggggcacattatcataatcgtgcaaggcaggggtggattcgctgtggcggtcatccatcttaacgtcgaaggcgtccgagtcaccaaggccaggatgggatcccattggatcgtagacgccgagacgggtttggcgacggcgcactaccacatctagccagaccgcggcgatgtagctgaccaggccgataacagtgaatgtgaagagggctttgtagctccggcatacggcgatgccagtcgagttgccccagtaggttgttgtgcatgatgttgttatggtgcttgccaggctccagctcaggagacccaaggatagcgcccagaggattgtgaggaggatgttgagcgatattgagagttttgttgataggccgcagctgcagtggattattgaggttaggaagatgttgaggagggagaggcctgatgcgacgaagagctagagggttttatgttagcgtttatcaataagatgggtatgttatttaaatggtcacttaccaccaggaatgaatatggtagtttgtagccatcggcgtggaggtggtaggtaaacaccgccaagatcacccctgtcacgattgaggagagggagatcaggaagcggatgagatgaaatggcagcggcggatatgccgagggtttgactgagggtgatcgcatggcgagatgtggaagatgtgaagatgaaagaaaagaaatcagccagagaagccctacagtcaacaccctgatgatcggcgctccacttgacacgtttgggcgtgcgtcatgtcgctatttttatatttttcatgggcgcagcttgcatcttcgtgaaattgtttcaaataagttgcatattgaattctggacatattgcaatagaacgtaggagatcaagtatcaattaacttcaatatctttcttcaataatcgaaatccccatcaaccaccgttttccccagccaatttagagccattcgcctcaacacaacacccgcgcagagatacaaacatctgctagcgcaaggtctaagtgttcggcctgcattgcatccatcgtatcatttccactttccaccccagacaactggatgcagtcccacacctgccgatcggctccatcgagctccacatggtaaacaaagtcgttggtaggggcaactgtggtcaccgctggaaaccatcacgcatcggcccttgatcattgctcgggatggaccgaaatcaccgcagctgggagatatccaactctggaagatgttcgagaaggagcgtgataccaatatcaccagccacgtaggggcgatggactttctggacacaagaagcttccccgacttgctcatttacgtgaaagagatatctggtaatgggaccatgtcgtcggactatggtctcgaatagatcggcgggtttatcgcgaccggaggaagacacgataaacgtctgaacatagtcatcgtttaggttggttgggtcgtcatctcgcatgtggctatagcccatgaaatagcagtgggcctgttaccattctaccatataacttggctcttcgcgggttctctgggtcgattgcctgcctcgagtccatgtttactttgtaggcatcagtttggggtcgtatttgctgtccacctgtgtctgaagccctatagcgattcggtaactgacgtttaaaagcccactgtgccgcgccatgtggttgatcatggctagtcttgggaatccaatgtacccagagcaagcagtggggattgttgaacaagaagtgcagctctcgggcccaggtacagcgcactcggattgtcgccgtgagggacttgaagcaagatgacagggtcacctacctaatatatattagatatatcaccccacagctacttagaacgaagcggtttccttttaataatgtcaatatccctagtatctcaagtaactatcccatttctcttttattaacgtacatcgttgctttacatatcaatttggacccctcaagagcttgtatagtaacgagccaatcagaactgccgcgccgcgttatcgactctctgccttcggggaacttcgtttataaaaacaacctacaacacctgcacccggtctccatttcccttttacagctcaatcctgtgcaacaaaaacaaacaatctcataggtgccacagaatacacgggctctccccgcccacattcctttaaaaacagctatccgaaagcttgcgagtcttctatcccccaccatgtcgacctacgaaagtacgaatccccatctctcaaatgaacctaaaattctaaagctaacatcattccagtcgaacacaacactaccgacccctcaacggccccaaccgcgcgccgccgccgccccgacctctccaccttcttctcaaccctgtcccagatcactccagctcccgaccacagaccccatgcagtccccgtcccaggagatgtgagcgcagcattcttctctctcgcagaggcgttggatatgatgcgtcgcgaggccgattcagcgccgcgccccgacgcgcaggaaggcaccgactcagataccggtcgcgatctgctgaccacgatgatccagtcgctgctcgcgcaggcggatatgccgccgcggaaggtggagggtgttgacgaggaattctgtgatagtaagaagcactcccctagctcgccgcgcccatcaacctctcccgagatcagcggggtattcctttgtccatcacataactaaccactcttggatctctttagtgctcgaacgcgtcccaaaagcatccctcaaaagctccgataactgccctatctgcaacaaccccttcgtggaagatccctacccgctcgtcgtccagctgccctgccacccgacacaccgcttcgatctggaatgtgtgcggccgtggctgcggctgcgcgggacgtgtccgcttgaccgtgtggactttgcacagcagcagagagacaaggcggaggcgaaaaagaagcttgttgaggaggatgaggaggaggaatgggatggtatgtatggctgaagagatcctacacgagactatgtatctaggtgcatcgtgaactgtcttctgtaatggagacgagactacatggcagtattgcctatcttagcatgagtgaatgactgttgcatctgtcgatcatgtacattttgatcgaatggatattggaagtaagctgaccggccaccatgttgatcgttgtgcctcttcgcccttaatccatatcatgaccaattcctcgaatcctggtttaatgtgcatattcacgaacagtctgtcaggttttggctgttagatgtgattctggagctgaatcgcttttgacaacgtatgatactcccgagaagacgtaagccaccaaacagatcaataatgtaaaaatatagtaaaggaggacaacaatggtgttttgctgtatgacctatacgccttagatccgaaaatacattggcaccttcatttcgagtcaagatcgagatacgcctatccacgagtcctttgtttcctcgttagctttcatactctaataactgatagtactaattaagcctgcttcaaagacctttgtcctctctttgatcaattttttggacagcttcattcattcctttgtctattttttgactactttcctaacaatgggcatacaacttcatatgaagctgcagtcctcgtgggatcttcccgctgctcacatataaatatcaagtcctcaagacccgattcatctcatttatcattccagtagacattctcttcaagtcataccatcttccactgtactcacagactgtgacaggacttcttctgcggattaccacatattatcgggtattttctactcccattcctccctatacaactttatctacttgcttactctttaagttactatcaccacgtttatgaatctcaaccacaaattggcaatccagatacttatcagtgagtatcccagcctatccaaccaccccaatgtctcccccgctggagactctcgcgcttgttttcttttttctattactgggaatgaccgtcatgataatgatgattcttgtcaaggaatggaccgagtaccaagctatgcagttttggccgaaactgcgtagtactcgcactctcgatctggagtcgggcctttatttactaagggacgtaaaggaactgacatggcgcgttgagcagatagaaactgattttggtcgcaagatgcacctcgctgaatacttgtgtgaataccatgatcaacccccatctgcttaaccgctttataactgtcagcataccttccgataacagacgcaagacgcaaagaccgaatatctggatgcctcctatgcgtagggatagcgcatgagatactcggcccgagtgggtcaccccagttctctaccccatactcccatgtctttcgaggcggctcaccttgatggatctagagtgggtagggttatagtactccgcagtacgggcggcttataactttttgttgaagccagatcagtttgaatgtgcctatggtggatatattacgtcaatatctaccataggcgctgttattgttcattttagtcttggagccgtctatgaaaatagaaaggtggagggaggattatagcgactttcgagtaatagccaactcaatatccgtagtcctggtaaaaaggtcggataaagacagctgccaagatactctgctagacatattttacaattagtggctgctttgctggtcggcggtagaaatcatttgttaaacttggaatgtataccaccttagtccagtagggtctatatgaatcatgaattttacagaagaaaagaattgtaatagtccaaaagtatttcagattttccgtctactctatgtacagtattcggtacagaattcatcacacgtaacttcaatgcttcataaaatttcctcagcccgagccttggatcggatggccaacttgcctgcctggttgatcatagcttcatagccgcttcgctcgagcacaccgccatcattattgacaacctcacgagcctcgagttcttcaacaaggcgctgattctcacggttaccctccagcaagaacttgaggcacatcacagcatgttctttgatgtatgggttgtgggcgtcgaaagcggtgcagcaaagaatcgcctccacgccgccgtaacgacgaatctgctcttggacatcgggacacttccagacaagcgaggagagcacaagcacgaccagcttcttgagattgcgccattcaaactcagagggatcctctgtgatcggcggggactcaggtcgagagtcgacgctgtcggcgctattgtcggcagggtctgggtcgctagggtcgtaaggacgttcgacagcaacaggggctggaggactagcgtcggaggcatcgtttgcggtgtcgtttcggggaggagggggagggggcacggagccaaaggacaattggctcagctggcccttggggatgcttgcttccaactccttgatcaatgtcaccaaatcatagacaatctcccatttaaccagcaggttcttccagtcattgttctcggtcagcaccgcgaagaactctaaaaattggtagacaccttcatagacccgttccatatcccatagattgagcgggaagtcctcagaaagagcccgctcggcgcggatctggccttggagatagattagagcacaagtctcggggatgatgttaccacggaagatggtgaagatgtatcggacagtgaggatatcaactcggttgagcgagctcgggttgcgagggatattaggttgagccgagcctgtcacagacgcaggagagtacttggctcggaagatgtgggtaagtatcttgatcacaacagcctgggccggagagatgatgtccttaggctggccgaaatccgagtaggcatgagacataaggccattcttaagcacggcctccatgatctggaccatcatcttgaagtagagctcgtcgtcgggaaggtcccatgccgcaatgaaaatcagtagttcacggagtaggttacgtcctgtctcctgcgtgagcagaatatgacagcggagcgcttgcatgttcctagatccattccgttcgccgcccttgaggccaaagctgtccacaataccggcctgaacaatcataggcaaagcttcgatttctgccggtccaaggactagagggatatctgttagaagaccccgctgttgatcaccaggacggccacggtattcgtcgtcttcctcttcttcatcatcggcttctccgtcgacgccatcgtcatccacatcatcctcgccatctccgtccacgcttccgtcagccatatgatccaggctgtgtgaatcatcatccccaactgtgtgtgaatcaccgtggtcatagtcgtgctcttcgtcgccatcgatatgtgatggctcctgaagccgagccatgagttcatccttggcctcttggagggtctcggcagccgattgagctgaccggggcatactggtatcttcatctgtaacaggtccatcgacagcgccaaaatcgttgatctctggaagatcagcccagcaaagacgagggaaaccagccgtgagactgcgatcaatagtcaggatggtcttcttcttggtgatttcgtgttcctcttcttcctcgtcgtgttccctgtggtcatcgtgcgcctggtcttcgtggcctttaggatcctcgtgctcttcctcgggaagcgcagccgggagctcacgagcgcggtcctggagatcagaccaaccgtcaaccttagcccctagtatcgcagtcaaagcagctctgatatccttgacctggtctgggtctctgcccatttcttgaatagcgctgaggtctcgccctaaaatcctctccatgtgatccttaatgttggccagaagcagcatggcagcctcttccttgatagttgccggctcccgggggaacttggcgatagtctccaataacaaatcctctgcagtttggtcgtaaagtgcgcgaatgggcgggttgatgacacgctctccaacttgtacaataggcgccactccttctcgcgagctggcatcgtccaaaggctccttgggttttatgatgttcgtatcagcggtcgaatggtaaccaaacagatccagccagagaaccatcttgcgatgctcattgtgcataataaagttgtgaaggtactgtagacatgtaatcagaaggcgcttatagaggttgacgactttctgccatcgctcctcgttccgcgcattttgctcgccatcgaagcctcgagcagtcacacgaacacatgtgtcgatgagagctagaatcctttggtcaaatccggtttccgccgcgaggttctgtgccttcttggttgtggcgaggagattgcgagcgattgtacacagatcattcaagcgctcaatgtctttgaccagtgagaaataattgtatgcgatcagatttgcagatgagtgttcgtagcttgctgcggggcttttccatgcgaaagattgggactcaaggacggggattgcttttgtgaggacgttcgtgagaccttgccagatatccggcgacatgccgagattgtgactagcagggcgcaacggattagtatacaaagcatgcaatggtcaatgatattgcgatcataccgaacatcgctctcctggtgtgtcttgtacaggatctgcttcccagcggcaagcatgtgctccaagcgcttgtcatcaatcatgcctcgaacttcgtagtggctcagtgtccctgcaaggattaccttgagcatgagctcagctggcgtgcataatggctttggatctgccatactgcaaagaaaactccagctgtaacgcgtattccttcaaacggtaaacagcgcggggagatcagagtgggatgaagaatctaagattcggaggtgtggagagacaaattttccgcccgcacgaatgttatcgttatcgcccattcgcccattctaagctcccagggctattattacgctcatagctctcttattggagaactcagaccttggaaggttccttggacgtatgttgtatacttttaaggtaaaagtgctccaaattgcctataatattcaaagtctataaactagttgataatactctactagtgtatccatggatgctccatagtatttccgtggtgccgaactagtacattttctatttagaaaccaacaagaagtacagaattcgacaaaatagtatgaaaaccagataaaaaaagtcagtctaaaatgacaccaataagacaccaaaaatagccatatactagtccaagatcaatggttggtcgtactactattattgtgaattaaaagaactatatatggttcgtgaaggcagtgattgaggcggcaaggtagtgttcaatgagagggttatgaatcggtggcatagctatttaaactcatcgccttttaagcatagtctcactttgaatgtcgacaacttgtagatagcgtcttcggaagtatattttaaatattcctttaaatcaaagttcaaactccacagatattccacacaaagaggttaatgccggatatctccttagattaacggacagatagtcctatcacgtcccgaagattataccaaaagcccatatcgtagatgttgtcaatatctctcatagtatgaattcgcttccatcgagggtcaggaggtatgtctgatcctggccgacgagcaatgcaattggactcggaggccaataaacatccttcagttgggggattttcatcagtgacaaggatttgatcagtatgaacaggccacagttgatcatacggatccataggaagagggctgtcgaaaatgagactccggtttgtcttgaaaacgaagccgtcttccacgtcttctttccaatcggtccactttgcactctcattggttgtcaccccagcccaaatgagatatgtatggtacgccaggaaagagatcgacagcggggcagtcatcaccatcagtagaaatactgtcccaattttgggatcagcagcgatcacaataccccatgtgttgatccaggttgtccagccttgcataacctcctgtatctctggcggaaccatttgcttaagtgtcccggagaggatggaatggccaaggtaggagccgtagatcaacatgacagaaagggagaccaagagcgagatgaagtacacgcaattgttagccccgacgcagttcatcaaccatacacagtggtggtcatgtcgagaaatacaagcgcgacagaagctgcaatgcttgctgcgcgctggcttgaggaatttgcaggtgctgcattgatgtcctggatgaaaaaggactcggtcatacggatagcgtctcatctcttccgcatggttctctgctgtgataaatgacttggtcacaatacacttgtacagcaggaaatatggcaagctgatagttgcgggtacccagagtcgatgaatgctcgaaagccgaggccacgcagccgggacaaagatgccttctccaatgaccagcaaggagacaaagaagatctagtatgcatggtcagtatctatgtgcataagtattaataaattcagagacccaccaggacaagcgggtggttttccttcaatacatagctgccagatcgattccagcatcgtaatacccttccgccgaacaagcgattatcgacaatcgcaattccatttggaaagtacacccacagtaccctatgcagccaggcgaccggggttttccttgagcagtcagcgcagagcttcaagagtttctaagttgccagatagctcaccggaaagctggcagcctgccaaatagcgcgataaaggtgaaagccgagaccgccagtatcaccagaccaacggttctgagggcccccattctgaagctcaagttctatcggtaagtccaaaggatatacttttctgtctgcatcttctggcggtatccttcactgttcctgccttccttgactcgtggtcggtccatgcggtctcatcgaaagtcgtcggttgtgtgtaagccacgtgaccgcgttctcagtctcggcgcgaaccgacggtttcagctatgacccttgtgaattgagactgccggaattacatatgatcgaatacaagaactgacaattggctcagcgagacaacgcctgtctggtaccatagcccgctgctgaatgggggaagagccccttgcgacacgtcaacacgtgataccgcgtcgcagacaaagctggcctactttagggcgtgaaagctcgaggaagagctttttgcggcttgatttctgagaagctaaaatggcaactttcacaaatgactcctctcgggccgagactacggcaacgaatctgtttcaaggcgcacgattctggctatctctcactgttccacaaaggtcgaggtttaaagaattaattaaggtacttcgggatcaatttatcttctttaaagcttgcagaggttaatgggtatctagcaatatggtggtaccgttgtgctgatggagaaggatgccgatgtgaagctggtggatcacacgagaaaagacctgcctaaggacacgtacggaacacggaactttactcgctcaagatcagtgtactaattcaatattagattctcatatcgatatgtagagcgttctatcagcaagggacgactcgaagatctagaagcgcaccgggttgggccatctgcacctcgtccaatgggtgcatctaacattcccacgaagagcacaagatcgttctataccctgaaagaggaccaaatattgtttgactgggtcgaaaactttgaacaagagccaggggcgcctattcaaggcaataaaatttaccaagatctaagtgaactggtatgatgctctcttggttctgtcaaggctacagggcacacacatctaaatccgatactaaccggtagggcatagtttcccgctcacccatggcaatcctggcgtagtagatacatcaagcatcttcgtggcaaaggccgtccagggggcggcaccccattatcatatgacgaacttttacagtctgcaccaccccaaggaggacgcccaaagatcttacctgcccgaatttccctaaatgactccacagcaaaatctagctcaagggttcctcggctggcaccccctgctccggcccaagcaagtacagcaaacagcccaaaacgaaaacgagatccggtccctgaagcatcgaatcgaaagcggctggatgtttcacctacgaaaagaagagcaattgaagcttctgacaccgtgggccttccctcacgccgtcccaatcctgatatccggagaccccaaccaaagtcatcagatgtagcggccacaccaccctttactacacggccagaaagaggcccacccggtatcccgttgtcagataccggaccgcttcaaggccttgggattccagaactctttccagtcctgaacgcttccatacagagccctagccgcgtccctcgggagacctcacaacgacaacgaccagcagatgtagcagccccgccagccccgccagccccaccgcggccattgggggacaatgccttcgcacagtctggccgattcaagaaacaagcatcgaatcctaaaccacgagtcaaagatatcttcaaagacccagtggatcccattttcctagagctcccattcttaccatcaagcccagcatccgagacgactgacgatgacacctcagatgtgcccgacgttgatacttggattgatcaacgcctggctctaggtgccaaagaatcccacgtgttcgatgctctgcggtgtacaagcatggtcccagggatggcagataaggttctcaaatacctcaccgctggcaagggtattcccgatgatatgccgggagtctggacagcagaggatgatagctgtttacaagcggaggattattcgcgggtgcggcgagtgttgacgaagcacggcgcagaagcgtacaaggatagatgggaatatttcagcatggcccggcagacaggacttattgaataattgaataatacacatgaaatgtggaacttgaaatcacacgaaggatgactacaatggacgagttgaaattgtgaagtacatgaacattagcgtgcagctagaaacgaaatactccccgaagacaccggtatgacctgcccagaacgcaaagaggaaattggaactcaaaagtaaacatcaatgtaagggaagcagtgccatattcaaaacgcgttggtcgcagtagagggagaattgtagcgatggccactcgctattgcacatccgaaattgaagaaacggcctagaaatatcacatgtgtaccagtttattggtgatatatcgacttgtcaatgagcaggatagatttagttatccttaaagacactatgggagacgttaggaacgaattccgagctttcattaggagattctaactcacagatgcgattcgtagaacttaagcatctagtttgatggttagcatctttatcgctgttttggcacggtgtaagaaatactttcagaggacacttttcatagcaggcctggacggacagtttcgccttgcgtccattgttgaactcgagccacgccatgagacctgcctcgccctcccggacaattgtatccaccgctttcacttccttatcccagttcttcccctttggaagccattgaatgccattttcttcggacgagtgggaagcttgactggttgtctccttgggtgctgattttcggcgctttctcttggcttcgctcgctgcggggcccggtgcaggcttagcaggcttcgaatcacccatagatttgcgcttgcgacctggctttcctgccacgcgtggctcttcgggcctcttcgggcgaccaccgatcctctcgtagtatgctgtgacaatatcggaggccccatccctatagtgtttgtcaataaatgcgcgaaacagatgtcgaagcccaacaagcgcacaaacttacatgagaccactttcctcttcccatgtttggtcttctaacttgtcgtaacccttccatttcacgaagagcttaaaggttccctgtagttggttggcttctcggcacaatgagactgagcgttgtgaacatacatcatcaagccaagcgtgatcagtaatatcctcgacgacgtagctgcatccagtcagagacatgtatcgatcagtcggccgcaatgcgcaactaacagtccttcttcctcatcctcatcctcatcctcctcctcttcgtctccttcgtcccgggagtcatggaagtcacggtcgtctttgccatttgcttcgggtccatttctgtaaggaatgtcggcgacttcttcgtcggatacatcttcaatgggagctaaggaacgaatgaggtcaatcgagatgctcagcattgcgcgtgcgacagatcaacattaggagaaaacactcacgaggcatgtttcggttgaacggtgagatgagattagagagtttggaaaacagattggcgattagaggattgaaacctcaatggcaacggtaaattcaggcgaaagactgtcgcatccagagcaatcgagacagtcgagaagcagaaacgcgttaaaggcggacaagatacactataccgcttttggcagtcagaatttcatttgtcaaaagtgcatttcgggaagctcccctcaaggctcagcttgcaagttcacactgctttgtctttttacttactcttcattatttctcgatctccttgtcgggttccctcctttaataatctctatattttgccaggtggcagcccaccgtcaacatggcaatgcgtaaggccgcacccccatacccctcattcttgaaatgtgctgtggctaactatgtggattttgatcttcaacagagcttgatatgtctcagggtgattactcctcgaataagatggtgcaactacgattcggtcgctgacatcaagggacagcttcaatcttgaaggatgagcagggacggccgtttattgtcgttcgggagtacgttcaccgctacgctttatcctccgttttcaaataccattgagagccgaaaggttgagacatgaaactgacggggattcttttgaaaacagtcagggaaagaagaagagacaacatggcactgaggccgttaaggcacacattgttgccgccaagacggtggccagcattgtcaagtcttctctggtatgacagtcggcaagcaatgaatggacagatatctgactctcgtttccagggtccccgtggtcttgataagattttgatctccgccgatggcgatatcaccgtcaccaatgatggcgcaactattctcggacaggttcgaccctgaagtccttcccccggagagatccaattctggctcgagagactgatgcgatggttacggttagatggagatcacaaacaacgtcgcgaagctgctggttgaactttcccagtctcaggacgaagagatcggtgatggcacgaccggtgtggtggtgctggcagcggccatgcttgaacaagcctcggacctcattgacaaaggcatccaccccatccggatagccgacggatacgatcaggcctgcgaaattgccgttgccgagctcgacagaattagtgacgagattacattcagccaagatgataccaccaacctcctcaaagtggccaagaccagtctgggcagcaagatgtacggattcttagctgtatattagttctatttgatgctgacggtttccatagtgtctccaagtcccacgatcaattcgccaagatcgctgttgatgccgtgctctcggttgctgactttgagcgcaaggatgtcgactttgagttgatcaaggttgacggcaaagtcggtgggtcccttgaggactctctgcttgtccggggtgttattatagacaaagacttctctcacccccagatgcccgacgaagttcggaatgccaaattggccatcttgacctgtccctttgagcctcccaagcccaagaccaagcacaagcttgatatcacatctgttgaggaattcaagaagctgcaggactacgagaaggagaagttcacagaaatgatccagcagctgaaggaatcgggtgccaacctagtcatctgccagtggggtttcgatgatgaggccaaccatcttttactccagaatgacttgcctgccgttcggtgggtcggtgggcctgagattgagttgatcgctattgccacaaacggtcgtattgtgccccgattcgaggatctgacccctgacaagctcggcacagctggtattgtccgcgagatgagcttcggaactacgagggagaagatgctggtgattgaggagtgtgccaacacccgcgcagtaacaattttcgttcgtggaagtaacaagatggtgagtcaaaacctgcaccatacgtagggagatgtgccggtagctaacttctgctacagatcattgatgaggctaagcggtcactacacgatgctctatgcgtcgttcgcaatttggtgcgcgacaaccgtgtcgtctacggtggtggtgctgctgagattgcttgttctatcgccgtcgaggacgccgctgtcaagagccccggcattgagcaatatgccatgcgtgccttcgctgatgcgctagatgccgtgcccttggccctttccgagaactctggtttgagtcccattgagacccttgcctctatcaagtcgcgtcaggtcaaggagaagaacacccgtctcggtgttgactgcatgatgactggcaccaacggtacgcttctagacaaccatttcataccccgtcattttcatcggctaatttgggttctgtagatatgcgtgagcacttcgctattgaccccttgattggcaagcgccagcaacttctgcttgccacccagctgtgccgtatggttcttaaggtactgctcccattaactctttctgtcgcgctcgatgctaaccgtcaatcagatcaacaatgtcattatctctggtgatgatcagtctgagttctagatcactagattctagtcctattccacgatggtaaaagaaaaaaaactgatgattctggtttgctatgtaaaaacatggtcccttacatagaacccttttagtttcaataaaaacgaaaggattgataatgtctctatctggtcactgcttctgaccttgctcttgatatgggcctttatacctacatctcgtagaacgccgcagcccagaacggcatctaattcgaacaatcaacatgagcgccatacgcatacgcaggtgaacatagccatacacctattggtacaacatactcatctcgcccatgaatcccaaataccggtatcatcccttgtgcctcgggttcacaacatgtgaactggaagtccttaccgaaactacagcaatcgcgaaatacataccagtccggtatgtaaaagcaacctaagccatccagccaggagacaggcttgttccgtaggagatccgtgcttccattcgggatcgtgtgggattgtctgtgttcacgagggtcacccgatatgccgaggaacaacaacgtacccataagaagatagacgcactcccaccacaagatcaactgacttattggcttttcggagcctggcttccattccccctcggtgcgcatttgtggggttgccgattttttccgtcatgtttctttcgcaataaggtcttctagactaatggacgaacggacctaagtagctagtgacatgtcccattatggggatatacatcgtgtggttgcccggatacgagagtgaaattctaatgtttgaaatcggcatcaggcagtcgacgtatactttcttttagacagcacctgaagccttgcgtgccaagtttaggtcatgatgggcaatgcgttagctccttggactttgtcattatgtattctcattcccactcacgactgtcctcgggatttatgcgagcgtcagtgctaaatacgactttttctctttccttcctaaataaatccttgtggggcgaagatgagatagtctctgcaggcacagtatagaagcccccactctacgaggtagcctgtacgacaagaagattccgatatcattactaaagagtagttatctacgcgctattcatacctgtagtgtcgttttaatacaagttatacaaattcagaacaagctcattgtcccgaatgtgttgagttgtcgtgacccggggaactacgtcgagaaacaaagtgtcggcctataggacggactggaattgtgaattgaatataaactcgataataatcatagcttaggcaattgacagagcttttctcggaatgacgcccgaatcagaatttgacggtgaaggccgcgtactaagtctcagtcttgataagatatatttatacttctaaaaagtgtagaaaggatgtcattatttccaacatctttcagggcgtagaggaagataaaatattcttttcttttcccggtttcctcctcgagccggtatagtagagctttcaacttcttgtaggctttcagctgttgattccaaggtttcacaatgcatggaagtacaaccccagttccccgcgattcatggaccataggattcggaattttgctagttactacagctcaactgagggcgagacaggcctagactagatctattttctctctttcgtttcacatgtaaactcttgacattgggagctggctatcttaatctggagtgttgaggagatgccctcttatacgtgtgagtttatattgctgagcattgaaaatgatgggtcacttcggtctagacggagaaagagtcaataatctgatatatcgcttagccagaccccatatactcagacacaatagtgccaacagctatccgtcgtattttgaaacaccagctgcgccagaaagccattgaactcgaaatactgtattgcaggacaattccaaagcaaacgaagtaatagtaaatgccgtaaataaagaccttataatgtgggcatattaatatattcataccacagctgcattgaggattcctatacatagcatacacgatttcaatgcatcgcatcccacggcagatcaatttaaagtcccccatgacctgcagcgggtcgtgttttagagtatcttcattggaatatgagaaaccgggcggcagccgccaccacaggagacggacgtcagctccagcatagccgtgggtgagtaccctagggcacaacgtaccctgcttagacagattatgtacttttgtacatggattgggtcgatctgggccgaattaaaatccatcgttgtggtgtgacaccgctgacaggtacgagggcaagccccgatctggcgcccattttcgtggccgggattatattacgtgggacacgcgggtctgggtggttgtgctggcctttctgtctttccttttagtcctcttgtatattgtggatggagagggatggatcaaaggtacgttgctggtcggcgtgggttttttctatattctgtgccctgcgttctcaatacgactggactgggctacgttgcatggtcctgtaggagagtagagaatgtcttatgtatttttttctttttttctctctctcggtagtcgacatagccgcgctatgcttgaagaaaacttctgtcggacatattgtttccgcagttcagatgacccggtactggcagctctatgtggaacaagatgcgagaagtagcatggtccagccagaatcgagacgtcggtaaatatagatgttgactctaaatggcctcggaccgagttaatgtcgcgtcagcctcatcagtgctagaatacgaatcacccaggttgctcacatgagcatcgtggtttgacgtggcttcatttcgttcgtagtagtctagtattgggctcttagacgtgttttatcttcccgtgacagccgtttgatgtaaattgagtatcttcctcggctcctggtgcaccactgccacttcccatatatggtcatttagtgcttcttcggggaatcgttggtctcgtcacacgacgatggacctgttaaccatcggtatatcacaaacccagtgatcgctatagttatccgagtttcatgacaattcgactgccttcttcggtctcaccgatctatagatgcttgcggtctactccgtactaaattttggaaatttggtatagggcacggcatgtattgttcaaggagtgacaacacttttcagaagtctgcattatctttctaattgtttcctttgtctgtaatctatttgcggttcgataggaaatagtgaatggtttgccagtgagtgcgttggccgaaagcggctttccatggtctggggtccccttaatgtggcttccccggattttgatccccgcaaaaggttggggaccttttgtgtatttgatagtttgtagtatggcgggagtcgacatattcattccaaaacataagttctaaaaaaaagtaatggtatccacctatatgccgaatgtgtacggagtactgtaaaaatataccgcccatccgtagctttcagcttgcaacttatcttcaagcctcaacaaaacatgtttgattaggtgtatgtaatagactttatttttagtcgatatctaaatattctgcgacccaacacagctgacggggaagcaggtgacaaacccggatacattggcttgatttcaggaggctccagatcagagcctaacacactgacaggtgcacagcacaaacgaaacataaaaatcggctctaagactttaaacccaacacctggtcagcatctacaatcagcagtgacagaatgccagcacaaacgatcaaagatatcaatcgatcagctggcacatggcgcgctgtcaaagaagccacagtgacaaccgtacaggagaggcttcgttcccaatcaggggttcgactcctggtggcctaggctgcgtgtcgatgaaaccctccatcttaaccaaaatcagcaaccaaagacagcgatctcagcccatcgcccgccacaatcacacgccgagagactccgaaccgagagatctttatacacagccgctacagcccttgtgggcgagaaataaaagcaaagagagctgtcagaagatagccgccctaaagtagccaccggatgcacatggcccgatgtagtcggcttgcattgtgggggttgttattggccaggcaacctaggatcaccacgtatattatctagttgcttacgcgatacaagagtataaaaggaagaaattgtttctcttccataggtaattaaatatatggatcgagactttaagtcaggtggttttgtgaattggactatttctggtgactgttgtctttgattactttgtatctccgaccatcgcaacaagcaaaaagcagttatgaccttttcgggaaaatgaatggtttgggatttgtacttggcatcaggtttcaacaaacatattctgcacaaaaggaattaattgaagatctcgaaacaggggtctggaagagcaaatatgaaattaaccctagtcatgacaggggctgtttgttaccaactcaaataccagtcaggcagaacaagtaaagaaagagaagaccgtaaccaacattcatatgtatttttttctggattgtactccttatgcttcctcagaaacaatttgcaatgacgaggtggcagatgaagtataaagcccgagtatggaaccttgcacaagctgcaacatcaagggaagtgggcccgtaacgttggaaaaatgagaacgacatgccagggctaccgaatatctgggaagatgatctgcagaaaccatagagtggatatattattgggccacaactccaaacaaggggaattgtcgacgatccgggaccaggggccgcgcagacgagatgggctagacctttagatggtatgcatggatgtgcttttcctttgctactttgtgtaggttgaacgagcaacagaaattacgcacatgaccatctgagcccaagctataataatagttagatgagactgcgatattgaagggcaagggatgttataaaaaacaaagacatacacccaattccagaacgatcctcgtctaggatagggatatattgggtgtcacctgttccagtgggatataatattttgaagccgactactccgtatttgcagagagccaaatgtatgaaagaagccgaagacattcagaagaaaatgatcgtcgcggatatgggaatcctgcttccggctggatcgcagaattcagaaacccacatcccatcttcgtctcagctagtttcacggggcctatcagcctcgcggatacagcaagctttcgatctggaagattccctggatatccctagttgaaggtcacatgcattatagataggccgatctttgcagagtagagagaacagggcgaaaggacacgaacgcatcattacgtacttggagtattccgtacctggtagaagaatatcgcaaatgcatgttgttccgcctcacttggtatgaatgtttctagattgagtttatcaactatccacctgactctgtaaatctagaaaactatgtcccgcttcgattccgctgcccgcgagtatcccttgttcgtaccagtcaactcttaaactagcttacatatagacttcttgctcaaagtctcaagtctcaattaatacgtgaccggtctccttttcataattaattaccgattcgaatatatatatcggacactaagatttgatccgagcatagacatttaagccggggaagcgggctacgaatagagtgggagaaattggagggatgtgattcgctgcctcgttgatgtgatacaaagagaacccctcgggccgtctaaaagtcgcgacatatcctatctactactccgtatcatcgctcaattttgcgatctatactccgtatcaacatccaagacaaagagttacgaggccgacacggcggtaattcgtgatcgccttgacctcaaggccatgggaatgaataggagtaaataattgacgatagttaccctcccgtacaccgttatccgctagatgtttggtcattcgagatggtgacaggcaccggctgtcacattggaagagtgactccgttagtttgttgatgcgaagcacgttgattcgggaccagtgacacatttaagcttaatctgtcgattcaaaactacaggttcaaggtccttttaatgattatttgctgtcgaatccctgatagagctctttgttatatctaggtatgatacgatgggaggtgagtcaatatgctgtatgacagtgatactcgcctgataggggatctagatacccctgcggcttcgagtccgtgtagatagattcggaaagctgatagtatttgttttcgtgctagtacctaggtagctcacatcattattgggtcgggcaggtagctgtcatctcaagccgttgcgcgaatcaatgagccaaggactacaatgacaagataagagaactggagatggggcccttttccgtgtcacatgaactaaggtgattggcgattcatcaacatagcccaaagcccaaatctaggagccagtacgagtagatctcaagagaatcagatggtaaaagacggggaagtcacgagcccctgaggtggcgcggttcctggaaccccacatcatgtgacgagacctgcgcgtgactttgccactttatgagctgtccgttcggcttattatgctcatattagacagaatatggtcattatacctggatacgcgagttgcacggcatgcgattgtgggtactgataccccagctcccgaatttgccctatcaacgctatgtggagctattgcaatcctgaagcgcgctccttgttatggcctgcgcttactccgtacatcaggtgccatctgccacggccctaggctcggtctcattccgttttggcgcctccgtctgcccgtgatcatttcatgacaaccatggtattgtacagcgcatataataatgacacatctgagtctgactggttccccatcgcctgcgggaatccgtttagacctcggtaccctggtatcctatgccctggtccaagtggggcgtgaccttccattttcccagtcccaagctattggcagccgcatccttaacgcgatcgctatgcagcgtgcctgcccaggtggtttaatgaggtatcttacgtgcggttccacaataccatctggtaccacctgaatagtagccagtgagacagctggatgtgtagacgagtagatgagtcaagagagatgggttctttcattgcacttcgttgtttctcttatcagattgattgtcgagatgacttccataagccatggacttgctgtgtaagcttcgcagataggaagggggtcagcagctatgaaaaaatcaggttgcataagcccagacaatgtttcgcatcctgtagatgattgtgtagtgtcatacatccgcagggttacgtctgttacgaacgaactgttttgaacgaatcagacgactccggtagtttttgtggtgaaaaaaagtgcacagtgattgactggctgatacctttttgactgggatcttctactaaggaaacgaaatatcaaacgaccttcatagagctattccgatgaaccgattttagactgattttcccatccatatccccgcaaatcttattgaagtctgggtacattttcagagtcttagatgatgacagcttacaaacttctatgtcatatagttaatcataccccgtataatgacagggaataacgacttggtcagatcagttacttatataggtaggagcgattttctcttatagtcagggatctcatggtacaatatcacatgatagatgaaacgtgcgcctggtgcgactttgccctgatcggccttccaggcgcccgggtatagtagggaaagatggttcctttccgccagtccgggcctaagggcaagggttgctgtaagcgttccacccccgtgacagaaaatcttcttacgtattctggcctgctgtcaatccgtttctcttcaaggaaaccaacactacaatgacagctggcagactcgtgacgatgtagcctaggtttgtgacactctcgactgtcgtgtcctatttggatagtcaaagatagaaaatctaactaggatgtgtccattcggaagataagaaaagagaaagggcggtaaggctcactccctgcttcaagtgaagctgtggctgactttctttttttcatccacatgattgaggcctaaagtaatttcctagaatatccctcggaatcctcaccgatgagagatgtgtagataaaatatacctgttttgaaacaaagcaatgcatccaaaacggaaaacgatctactatggaagaggtacgctggttccccggcatgcagcagggcttggaactacactatccctttctcctggataatagctgcttgcgggggaaaaagctggggaataacacagatctcagccggaatcaacaaaaaccaaacagccattagaggaatgaggcgcttataggaaagtgtataatttccaccggaattatttatgtttcaatgtctaactataaccttgagctcatgacaattcatacttccggccatgataggctcgagaatgaacgagcctcaagtcccatatcggtgaccacaacgtggcctgggatcttagaccgatccctagtcttttgtacgcagtgtaccccatagcccgaatgtagagcgtccgtgacgaaaatagcttaaacgcgacatcagtttggcaggtcagcgggaccatcgaccctgtcagcaccaataactagcagtttgacagttcatcagtcagtagacctcttttcttacatacaggagtgaagaatggattgtcagtggcgagaagtaatgtccaacgaccattgagatacatgaagtggcgtagagagagccctggtctggacttcgggacagtcactgcaactaccgcgttggagtgttgccgtctttcgatcagtacattttggcattttctttctattattttatcatttatatattttctttgccccgacaggtcacaggcacttagagcattgatgatttctcattctttgatatgaatgtggaagcagctaccatagttcggctttagcactaaagagattgaaattgaagctttgcagggaaccttgatttcaccgtcggacggttcaatagttaggtaatcagtactccgtggatcgaaacagaaactggtattgacattacagaggtatttttaggaggaaggaaaggaaagtctaaagtcgtggtggaagacggttggaaccatggtaaggtgtatccgaatacatggaacaggtatcgatgtaattcagggccccgtgatgcgatagaattttccccttcaccgaccgttatcctcggcctggagttatttcggccttttagtatttttgaattttggattatctctccccttgtattgtcatgttcttaccaaatattcgcaaaattcttattcttttcttaaaagggaaatattccaattttcgattttcgattttcgattttgattttttgattttcgaatttattaccgtccccctctccttccactccactccacaagtgccgccccccgtcattcttattatcgttccgactccctttctcttcctcttctattctccagatccttctaacagttcacctcactctcccaacctacaatctctctcacacccgtcaatctcgaaggttcatctcaatccggtctctcgataccccctccgtttctccgattcttcgccccggaatctccgcacagtggcgctctgacggaaaactgacggacattcgacaccccatccttcctcttgctttaaaatccaaattctttcacgatccgcatctttcgtgtgagcattcgattgaatcctagacgccaaacccgattgatcgacccttgcaacacatctcagggcccagactcaaatttcaaggcccatccagaaaccggttgattcttacgaactttcaccaccgcatcttaagcgccgtacgaccactatcgggggagacggcgaccccggaaacatcaatcaacgattcctcaatcattacaatcgcttcaactgctagttgaggcatcgcgaaaatgcctttaacgacaccagttctgacggtggacgcggacaatatccataaggtggataccgcgaacgctcaaagtcttcatgggatgtggatgggtaagtgacaattctgctggttgagggataccttgttttgctgacttctcgcgcagtcttttcaaaatgtgccgactacatggaccagggccgtcgacttgaaaatctcagttggcggttgtggacgcgcgaaaccttctgtgtcgaaccggaaaagtctaacagcacttctgccctcccattgctacgatccgaagctgcggatttgcccgaactctccgccagtgtcgagtcggccgcgtctgatcaggccgagcgaatcgaagctcacatcaagcgtcccaagttcaacgactaccgaccggctgtcgttcgagaggactcactagcaagcctaggccgtggaaaggagaagcacatcacatcgttggatttggagcggatggtcctcaacatcaaggaaaagaagcaactgcagcctatgccttctcacgtcgagcctgctgcccccgttgtcgacatcactcctcgcccatccacccctactcctccttccgtctctaccgctcgtcaagttccgaagttttccgtccgaccgaccccatacccccatgagtcgactgagtcttgctcgacgactgcccccgagggcaacgatagcgacactgcacaggtcaacgcgtccgataccagtgtctcatcttctggcattctttctagccggccgcaattggtcaaatctactagcattgttcgtggattctcaccatcacacatctcatcttcatttagatcgcaaccaagattgtctatcgaccctagtccttcccgtgccgctacacaattgaagccgtcggcattgaggaagaagggaggcatgtttacactgggcggctcctctggggatgacgatgaaagctcatttgaggagcgcatggttcctgctcaggagaacgcgaacggtggagggttgaacccgaaaaccagcaacccagaatctacgaaaaagactgcctctttcagcaatcaggtctcgtcccacatcattcctaacttgaaggacatcagtcgatccgacgaagacgccattgagaccgatgatgaagtctcagagagtgcgattgaagatgatgaagattctgattgggaagattcaatcactgaaggtggcgggtctagcgttgacgatcaaggagggatgttccaacgggttgattcccggcccaacctggtctcgcgccgctcgatgcttactatgatgatgcatcaaccggcccgcatgcaaggaaacgcgttccggtccagccccgcacttcaacgctcgcggttgacctcacccagtggtccatctattcctcagtcacctcctgacagggaagaggaaagcttagtcatgcgtggtcctgatgttccccgatcgaagcctattgtcatgaacaccaacgcctcgcagtctatggcacactctccgcgaaccacccgtcgtaacatgcttgctactgaattgacagagtctctccgccgacatcttctctgggaacgccagcagaagagcgcgactgcgaacgctttcctcaagcgtcgccacaccgcccacgacatgaagaacctccaggattaccctggtcccaagggtccacacaagggagttggtccgaaccaggctagtgctgatgcagaccctaattctgccaactttgacctgggcaagaatggctcctggaccaactacaccactgactacggcccctgggagtaccacgtgaagggatggtagttcattcgctgcgatccacctcacctacgcgcttttcgaatttccacggactcgtttgcaacacagcccagcttttctttcttgacacgtacgatcacgatcatgcattgcatatatggcgcaaatctgggattctttttctttctgctttgtttttctcgatctcatcggctccgggggcctggatgtcatcatgacattcactgggcgtttgtcctgcatggaggttatggaacatcaatttcgagggctattttcttcttacgaccttaatatccatgtacagttcatatacctcgtcccttttcgggtcatcaacggttgatggcacatgggtcttgtctctttgcgtctcgctttccaagatatttccgggtggctttttcatgcccggagagttcaccaaaaaaaggtgttttattgctatcatctatctcagcgctgcgtcttttgctgcatgaccatatttgactgcagaaaacgcctagcatttgtttcccactcccgattatcatcggagaggtagtcgttttttttctttctccgcgatacctgataccacaacgtttatgttttccaattcttcatccggcaccgatcttcgcgatcccgccagaacttgtacgctacctgatgacagctaaaaacaaaaaatccaatgaacgaaatcagagaaaacctgtcctcacctgcatgtcgtatttccttgactgcgggcttagatatcagagaagaggcttgcatatgcctggattggcggtctggatctacgtactgtagtagatagctatagctctgctgcagagaggcacggaggctagcagaggtgcgcacagccattcctgcgataacagtgccagaataatcatgtggaaattcagggttaactttgtggcgctgacacgtatgagagatgagtctatcgcataacactgatacctgtctgcatgtacttattcaagtggtcataatccatttggattaaattgcctaactacgtgggttaaacgatacttgactgtatatatacttattcataatagcttatactgggtacatctacaagtgccgtatgttgtactccccataaccaagaaaatcagtgttgatctacaatcacacccggaggcatccacataggaaacgatagagttacactcctttatgaatcaaatcatcgcatatcccttaatgcggtaccacctgcctagacaggtatttataagagtttagccatggattcatgaatggacgtttcagtgcgaatctccgccgatcccagggcgccaaaaataataaaggtcaggtgggatgcagaaaaaaaaaatcaatacaggggtcagtcaaaaagcaccgcacctaatatcccagggcccgttcggaatcttgaaaaagatgccaaaagtacctatctttcccgagaagcgaacagttcgcgcagatctagaacacagaccagaaactcggatttcttttctaattatggatttgaccatatgtcatatcacggtcttctaaccctgaaaggtcgtgatgttgatatttgatattacaagctaatttaaccccgtacagccccgaagtctttaccgaagagaagtgtccatagccgttccataaccataaccgacccgatcgaccggcgagatccctcggtgcaatcctctttattcggcctcgcattggccctggcacatacgagaagctatgtcatctttgcattagtttacgccagagctcccgcggcagtcgggaggtggtgggcttgcaatcgactcgacaacttaagtactcagtccgcggtggctttctcgccctgcatgttccgcagggccagctcctcggaggacccgggggtgagggtgattggattgggcttgcactgagtggctggcaaggtgagttctaggcctgttgatacttgtatacttttgagatttgtatcttccctgcttttgcgttgaatccggggggcttactcaggcgtggggttgtgctaccggtactccgcacgacgtacaaactactacctactgtcaggagggaatcacgttccgctggacggcctcattatgacaccatgagtaattgtgattgtaatctacatggagatcttttacatggatcttgcctgggttatgcatgttttcatcatgattttgccttcgcttacattttgccatgtcttactggcagtagttgcctgaaggatgaagattgacgtgtagatcttgactaattatcacgttgatgtcattgttggcataattgcgtttccatgtgctttctcggttggatttgcttattcccatgaagagatgtgtgaggcctcgagatgtgtcagagggtaaatcagagtggcgtgcaatgccaatagaaggagccttatggggtatacatcgtaacccttagtatgggggtttaccgggtgtccacagtcgtcatgtggtagctgcacatgaccggtgcacatgatccgggggtggagccgctggattttgacacccgagatctatttctatgtgttatgtcgtacgtgtcttgacctcacgtcgactatcttccacgtctcatctcgtctttaaacaataccaatagacacttatttgacctaacattgtctaacctacgtggtagtccaagtcccgtcccagcaaatgacgtatgtacaactcccttctccaactttgaactgatgtggggatgaagactttttcttcctaaaactcccgacatcatctccattctaggaacgtccccagtctgtccggtcatatccgagccgtggggctccaatacatagaaccattcactgccggagaaacaaaggagaaacaagcatctgacatccaaacgaagccaataacatggatataacagatctcatgttctctgtactcactgaggaaaagcaatattgactcaatatagcccagatcaatacttttatcccaagcccctttcttccatgctgatccaatgacaatgaatcattcaaggtgaaacaagagcctcctctagaaccatcaccaaatctctatacattgcgttcgcattccagcctccatctctagaatccacctgcccagttagggctaactcctccctttcccggccagaagagtctttcttcatcttagcttcatacagcaaagtgggtatcacggtggatcactccgaaccagggacaggcaggattcgctgtctcctttttcaccggtactgaaagtttctaattgacgccgcacggagtacacgcatgacaacttcggctccgcatttcctatttggggcttaatacaacttgttacatacatatgttatgggtaccgcgtaccaacccccacggacccctccacgatcagggcttcaagaagaggcgtcgttggaagaaaaagtggatgtcgcctgcttgctgtacgattgacgaattgacgcctaactggctcatcgggttggtgatgtgcgcccgacgtgcaatcggcaagccgatgcagctgcagcatatccccgaaagctacgatatgcgaggatgcaaggatatcgcgctcgtgagctcgaaatagggcgtcttttcggtgttcaaggatcgagggcacttcgcatgcagctttgatcgctttgtccaggctcttcgatgattgaggcgaattcaagacgcgcaagagtctccgttgatttcttcttgatcgtcctccgctatgaagtgatcggccagccaggacccatacaaaccctgtctaggcctctcgagctctagaacagagccgatccttgctttggcgcggttttattttaagagttggactagctacgctttgcagaattcttgttattcaattcaggggacatatcgaaaatttaagtattagtgcggcaagattcatatcagctgttccaaatcacttcacgacatttgccactacaacatatgcacaacataccacgtttcgtggctgttccgaatgatattaatattcggcgaaatcccgaatgaggcgatcgggattggcccccgcctgttttccctgggccaagaaagtcgacattcacactgaatctgcaaatctcaacacaattacagcacctgtgattggcctgaattattattctaggccctccggtggagacgaatcacgtgtatcagctatgtattccaggagctctgtactccgaaaccccgcaagatcaatatcttgaattgctgccatattgagagaatcaaatagtactacttgtattaattgtattaaacttcaaggaggtatcatatatcccgcaaggcatatcaatatatagaaatgccgacatgagctcaacctcgaaagctgcaagctatgtccatggtcaaacgcgccaacgcccatggaagaccgagcgcgatttggaaggcttctggaaggacgatccggttggccgatgaattccaggtccgattcgcgcttttccgctttcggtgtttatttacggtattgtattcgtctcttacattaccatatttgtacagcggaagcccagtaccgcggagcggagctcccttaccgatgcattgaccgaggctcaacccaagtacggagtatccatggatgttctcggtatattgtactttgtatccttgtagcttgatgaggagtttctgatggaacattttttatcttcttttaagcagcttatcttattttaaatttacagctggcaattagggctatacatctaagacagaactatatcttgtaactccccgagggtttgggctcgatatcagtgggatcttgtcttactagcggtagccacagggcttatgcatagaatataacattagaggtcccactgtacatccgagtgacctccaggtagcctcgccaaaaccatttacgccacagctattattgtgtgggatttcagagttcctccatattaaagtgggatcatcttagtatcactatgcactgtccaattttttgggggcttggctccactccctagcttttcgaaggtcgctttgctcttaccttattaggtacgcaggcatggacatggtcccgaaaagaaaccaagatacatagccgttatatctagtggatcgatgttgcatcccggttaaacgcgtaccctagcaccccatcgcgcaggatggagttctagaaactcgaaagcgaacccctcatctccgcgcatcgcggaccgaccgctatccgtgactggtggccgttgaacatagtgcgctgagcttgttgcgcccgtcgggtcgtattccgctctcggtgatgtttatctttttctctcctcgcatggcctcgccggggctgggtccttgttaaggggatatcccccggcatggatgtgggagataaggcgggtgccgcgctctgcgtggtatatgctctgctggcagatgaaattcggaatcatgtttccctcttcgctctttttcgaatagcttttgtttcatgtattctacatgcattggtgatgtgcaggaagattattgccaatcaatgctagtacttggttggttttggcttcctgttgtggcctcgagcagatgatgtgctttaagacctgcacgccacagcattaggttgggatttggatgtgaaatgacgaaaactactttatatagttgagatgaaattcaatgtgaggaccatgcaatgactatcattaagatttgtgagcctgcacttgtacattgtacaacatacgatgaaggcattagtgaggactggagctggatagggagagtccatattagaacatccccgaacatttggagatcttcaactagaaacctccatccacctgggcaaatcgattcattgtgactcacagctcacagtatgactggaaatgagtgaatgtcaaggcgaatgagatcatcggttccgcctgaagtcttggcattcgactgccagtaaaactgtaaacaactataacttcttgtatagcttcatatcttcagaccttaagataactaccactgcttatttgtgaccactttgacattcgacgtcacgtggctgtatctcttcacagttttccttccgttttatttttgcttagtgccgtgacttcaaatatcgctacaagagttcagacggtcgcacacctcggcttacttactgtgcagatctggtcctgtcgatctcctcaaggtcacccgatctctgcgttggcagcgcgcgtcacctccaacttccaagtcgcccagaacccggccattccattctggatcatctctcgcaacacggctcgaggctcagtttcagtatggagaataggtcatttgacgaggcgggtccaacatcccaaggtatgtcaaagcaaaattctattattggctcctaaaagccatctcgccggaagcttttctcccaatcaattctacgagatctacttgggcggattcactggctctcgtattttcagcccccctgttgcatgtccatgcaccacatgttgcatccgccacaaagcctatcagttcccatgttattttctccgaaggctttgttggcgtgcagggtggccccggtctgccaatatgcctggatcggagtcggccgcccgcaaccctttgtgatcacacgctcatgatacttttgttcaataggtacagcgctgccatcctctttgataagtgatgagttgtcagcggtccggtcgcatggcgttgcatcccccgatgaaacgagtgctgctcgccagtcatcgacccagcggaagaaatgtcgctttttcaaaaccaaaaagggtaagtctacattctgagtttctgtctgtaaaggatatttgcctgttttttccctatgcaattatcagcgcgtcattgaatatggacttgagtgccacaaacaagatcctgtacgcaggatcacccaaaggggcacttataccgaggctatgaccagaattgcacgattgatctgtgccccaatcctttgcgcatgtattctcggtgcttgtcatttgataagagggtgatgttttgttcagattatatgctaacattgctcaaggatgccgaattggagcagcatgtccgtatttacatgatgtctcggccattgagaataagcaggcaccagccatttccccgggaaatgaaagccagacttcggcacaagccattgtcactggggtcgagaaactgagcattgcgaaccagtcgaagcaggcctctgccgcagctcctgtccagccccaaagaccggtttcgaaattggagcagtcagacccaagagagtttcagatcaaccaattgaggcggcgttaccgtccacaggaagtcaatgatactcaaggttctactttaacctttggcttggtaccttctgatccggacttcccgttcgagcttgaaagactccaatgtgtccttcatgtcccaagctcatacccgaaggggcggcccacgcttgcagtgaccaattctgaaatggaagcggcgtatcaagaaaatgtcgtcagaggtttcaatgatattgtcgattttacataccgcaccaatggccgaggaactcttttgggttggctgaacagtctggacaaaaagctcgaatcactgctaaccacactggagcgggggccgacactgaagtttttcgctaacgttggtgatgtatccacgactaaagaacctgccaaggccccggagaagactttaacccagccaggatcgtctcaagatcatggtagaacgccgagtggtgctgctaaaccaacaccacagccacgaactgtagtaagtagacacacagccgaagcaaaagctacagccgagaagagacgagcaaccgagacaaaacagctcgaggcgcgccttggaagactgccgatgtatcaaaaactgcaagatggcaggacatacgttattccactccagtcaactaaaaaggatcgcctgccacgaacacttcaagcgctcaagactgtgaaattgattgtgccacaactctacccactcgaacacagctcgatcaagttgcaaggagtcgaaggccccgaagtgaaggccacagaagtgggatttactcagtgggtagaacagacttcgcagctgagtctggtatctcaagtcaattatctggcaagcaatatccataagttcgctgaaacacccttaccagagcaggtgtccgcggaggatatgcctctgactgttgaagaagacgaggatgaggttgtggaagagcctacaaaggcacctgccgtgccctcaacccaagataatgaagacaagccacatcttgttgtcattccacggccacccgaatggtcggttcctaatcccaacagtggcgccgacgggacatcgggtgagtcgagtcacgaggaagacgagtattcagatgaagaggaagacgaagaaggtggtgcacccgttcccgcatcagtggacaacaacgcacccggacgaggcatcgcactttccttcccattcttagagctctacggaattgagcttctggaactcacgagcctcaatattacaatcaaatgtgaccgatgtaaggtggcggtcgacatcaagaacgtgccacaaattaccgatgagaagggccagatgccaaaaatggagtcgtgcaggaaatgtgctaataatatgagcgttggtgagtacaatcaacctcattctcctttctgtgatgggttgctgactttcgtgtgcagcattccggaggcagttgatgcattctcatgccaatcgtgctggctaccttgacttgggcgggtgtacgattggggacatgctccttaggttggttcttgcaacatcatcaaagtgctattttttaacccatctcgctatagcgacttcatcccaacttgctccgagtgctcgacgccccatccggcaccgggtatacctgcagttcgcggcgagagtgccatgggtacatgtcgcgagtgtcatcgcaaaatgggtaggttatgatatgcagtgtccgttgtttggctactaacatatccaactttagtgttcaagatcccggaggtaaaattccttctagtggggaatgcagcaggtaagtcccgatatatcgagcccacaggagacgctttttactcattgctgtatcatctagtcacttctcgtggagccctccctcccaagagaaaggttcgtataatctacagcgtgtatcatcatgataaaatctaacaattatctcagcctcaggaagtcctcggtattgtcgcaggacaagaacttccgcgtcgtggtcgttgccagcactacgccaagagtcaacgctggttcaggtatgtggtcccctatccatgagttggtagcactcgaaaaataggttatactgacccctgtacagattcagctgctgctcaaaggttttcccttgtgacaagtatggtttcctactaaatgcatctccatcttttttcaagtgcttattgatttacctagatgccacgatgcggaaaccgaccacccgaacgaacacgcaaatcgtatgatatgtggctactgctcccgcgagcaaatctacaggcctgagaactgcggtatttgcaaagcagtcttgattggaaaggcaggtagtgggttctgggagggcggaaaaggaacgagaaatcggactctaatgagtcggaaaggtatgtctctcatatcaaacttcctgcgagtgcactcatctaatggggctctagatccgaggaaattcaagcggattggagccaatgctcccacttcgagttcatcgaagcggaagtaaatgaatgaaaacgtgattaagactattgtatatctcaatatatcaagtacaatagtttatttcaatcttaaaaaaccctttcctaacctaagtagcgaaaacctaaacagagcattagtgtctcatcattaatgtcaaatctcatcctcacctgatcttcttgttactcactaattactcgcacaatcaaatccatcagaccaaaatgtccgcgatactgtactcgctagaagccgccacctgcgttgctatatgggtgatactattgataatgagcggcgctgctataggtctttgtcctgatccagatacacctgccccgctttcatcgctaagaggaatcccaagccaatacggtacagatatattcagagccaccgaatcataaaataaagaataagtcggtgcaaacacagaaaaaatgcctcgatgataaggaacgtttgcttgatgaatcaagggccatattcaagcggaaaacatacttgatagagcggcttcaacttcgggaagaccgaatggcaaagggcgacattggtgctgctggaccatatccaaatagtacggcaagacatctctatgagcttcagttcaagattcgacagatttggcgtgagcttgcggacttgctggatcgatattgcgactgaggttggacttggaggtcaacgggggattactggatgatcggagttgctattaagaatggggttcgagacagtggtaggagcaataagttacttctgattgctcggttgatctagagtagagtaggtatctgttcttttaagaatccagatttgcttcattcaaatcgcttgtttcgcctgttacttcccctaaagtatctcagctggaggagcaatatgacgctgatggcctccatcaagtacagcaaattggaaattcttttgcagccttttatacaacacatatggcaccatctctcctcgagctgcaagctaccaatcaccactgggaagccggagtgcacaaaagcggacatcccatatctcgacttgaattacgaaacatcggcagaccatgacatgcttcagaaatattatattaaagtgaaagttcccatttcgctaaatacaagatttatgcccccaaactgcaagaactcatagaaaaaatgcccgactatacgaattcttttgtcctcaaaccaagttaccgcggagttcctgctctcgttcgatggcctcaaataacgacttgaagttaccggctccgaagccttcgaagttgtgtcgctggataatctcaatgaacacagtgggccgatccatcatgtgctatttgtttagttagtataaatccacgaatacttgagtcgttagtttccacataccttagtgaatagctgcagcagatagccaccctcatcgaaatcaatcaaaatatccaagctgcggatggtctcgaagctttccttgagtactatgccagactgcttcaagcgggcctgcatatctgtgtaatatgtctcaggtaccttgatgaactcgacaccacgtgctttgaggttggtgatgtcacggataatatcgtcggtatgaagcgcaatatgctgtacaccggcaccgttgtagaagtcaacgtattcctcgatctgggattgctttttgccctttgctggctcgttgatgggcatcttgacgatctcgttgggcgaggccatgaccacactactcaaagctgagaattcactataattagaaggttagtcatggttcttggagatcagctaaaatatattataacactcacgtgcagatttcgttgtcgtcgacggaccagaaacggtggaagccaagggccttctcgtagctaaccagtggtattagtaattgaggcctaatcaaacaatctaggcgaaacttactattcacagatcttatccatctcattccagtcctgatttccaacacagtgatcgatacgcttgagatgaacaccaggcaagaactgcaaaatgggatcctcgttaccagtctcagcacggtagcctggcatgaagataccgcggtactcgctgcgctcaataagagtatgggtggtctgcccgtaagtctggatagtagcagtcttaacatggccactcttatcttcaagaaccttagggttagagacagccttggcaccattcttcacggcagcaaagaagacagcatcgacgttgtcaacctcaaaggcaacatcttttactgcatcaccgtgcttctcgaggtggtcatggatctcctttagctcggcttgttcttcggaattgaaacggtcaatttggtcaagggaccgcagaggggaggtcaggacgaaggtgatatcgccgttgcggatgacatgagagcagatattgcggcttccagtttcaaggcccttgtaggctatacgtttgaagcccatgcgggtgatgtagtagcttgcggcctgcttggcattgccaacgtaccagtggacatggtcgtaaccacgatagctggccactgaagatgcctcgtcgacaactgaggggggaggactattggaaatagctgaaggagccattttgctgaatctattatgtttgtatgatggtgatattgggggaaaacgtagaaagatggtagtacaagatgagaggcggggaattcgagttgaagttaaatattcggttcctttgatttcaaatagctggtcctccagtagccgcaagtcatctcggcagatatcttcttcagtccacttttgttactttacacttagacgccttgtcatagctcccggccgcacggctatttcaggaccctgaaatatccggagatacccgggcccgctgagatcatcgtcaatatccgcctggagatcgatttcttagattcacaattcttgaaagattttattttcttcttcaattattgtgcatagaaccgattgcagattgagtctcacaatagcccacaattcctcgcctcaacaccaaatcccaagatgacatctatcgcaactgctcgcccatcattgacatctaatgattccgctgtcctacaagctctatttgacgccgaatcctccccctcatcgggagtcaccattgatgcatcccttgcttcatggccatcatctctgaacatccccgaaacagacttggcatcgctcaagcagcgcgaaacagacatcatccgcaagctgcaatcaaacaaatcacctagtatagagacagtccagtcagcactaaacgacttcgacactctactcacccagcatccaacatatccctccgcatacacaaaccgagcacaaacactccgcctgctggtcgatctgatctacatcccagaagcgggtagtgatcaaagcactcacaccgaggtggccgatgctgccctctttgctcctaaaacctcccagctttgctcccgcatcttctctgacctaggccaagccataacctttgccacaccagcctccccggctgatgcggtctcaacaactcaggcacggctattggctgatgcacacacgcatcggggatacctgcttctcaaagcggcgcgcgtgaagaaggctggttctggtgatgataagacaggcccagagcgcctgcgtggtctttcggctgatcagcttgaagaaatggccagtcgggatttcttcgttgggggtcgctatggaaataaggttgcgcagcagctttctgtgcagacgaatccctatgctaagatgtgtggggctattgttaaagaagcgatgaggaaggagcttgaggagtgaagattatttagcctgaagaaataatttaatttgcgaagttggtatatgaaataatgaagcaataaggaaaacctattttgatagatttgattgaatgctggtatcttcttatgctacagaaataagaggaaatgtgcacattttctcttcgcagtgctcaggcccaaaccatagcttatgcctttttgttggggttcacaaagtgccgcttgagaggcttccagctgtgctcgttgtattctggctgcaccttctcgcaggtcttaagaccccactccgagacgccgaccatgtgagtactaattattgtcagcaaatatgaagtctcggaaatgatagcggaaatcgaacgaacctttcgaacataaaagccatacttccatcaccaaccttttgaggcttcagttcagcattgctagctccctcaaaagcacccgagtccggaccatgagcgctcatgacgttgtgcaaactagcaccagcaggcctgaaacctccgccgaccttcgcatcgtagtcaccggaaattagacccatgaactccgacatggtgttacggtgataccaaggtgggcggaaagtaccctctgcgacgagccagcgaggagggaagataacaaagtcagcaacggcggtaccaacatggtccgacggagctgtcagcacagtgaatatagaagggtcggggtggtcgaatgagatcgaaccgataacattgaatcggccgagatcgtatttgaaggggtagtagttgccgtgccaggcgacaatatcgaaaggggtgtggttctgtcgcgcggcgaagagcgtgttgttgaatttgctgtaaagcttgtactcgctttcctcttcatcgtcgaaagaggcaacgggggcttggaaatcgcgtgcgttggccaggcagttagatccaatggggcccaactctgggagctggtagtggccctggtataattcacagatgtatccccggacagggccgtctgggagcgtcactcggtatctgatgggagtgattagctgttgatcgtatagcggatatggaaagacacccacctaacaccgcgagggataacgcagatttcatttggtcgcaaaataatgcgaccgagctcagtctggatgtccagcacaccgtgctgaggcacgattaggaagtctccatccgcggagtaaaaagcttccttccccatgtccttgcccgcggcatacattaaaatacccagtccttgcttctgggttgggtctccggaccctgcaatcaggtgcagtccatgtacccagtcaaccttctcatctaaatcgaaggggttccatcgcagctggttagggatgtggtgaagcttatcggtctcagtcgtcatcctcgtatgatacgagtcggcatcctccgcggtgaagttctcatgagctgccgcgggtagaatccgatacacccatgtctgcttattctcatggcggggtgcagtgaatgccgttcccgagagcttctcggcgtagagtccatatggagctttctgcggggaattttgaccgattggtagagctccttcgatggcttccgtcctatttactcattaattttgggttcattcgttttcatccgtgttgactatgtgtatacatactcgtgatacgagtcgaagcccgtctggtatttatagggatcagggtggttgaacttagtgacaggcatattggcagtgatttttgatgttggatgatgcagaccttgtcttttcatatattccagatcaaccgagggtctcctttcaaaagaagcaattaatgtgaggtcacaccgttccgcggaaatctgagaattcccgcgattatcctcattccgcatcggttgaatgcggggggagcggaccagttccgccctaccttcgaggggctaaacatcatagtcaggtagttaaggcccgtcgctttctctttctttgaacttcttcacacattacatccatcatggcttcgtggtttcagattcccaagaactcgccgttctcgctcgccaacatcccgttcggcatcatctcaacacaatccacatcaaaggccgctgcgattgcaattggtgatcatgcattgaacttgagcacatttgcttcatctggaggcttctcacagcttccagctatcgagcagcacctagctgttttcagccaaccgacactgaatgacttcgctgcgcttgggcgccctgtgcaccgacaggtgcgcgagtatctacaagacgtattccgcgccgacacaaagttcccacaggtcctcaaggacaatgcctcccttcaacagtcagctctgctgcctttgtctaaggtcaccaaccatgttcctatgcaaattggcgactataccgacttctacgctggtctgaaccacgcctacaacattggtgtccttttccgtgggccggccaatgcactccagcctaactataagcacctgcccgttgcctaccacggccgtgcctcatcagtcgtggcttcaggaacacccctccaccgtccccagggtcagatcctggcgaaccccgccgcggaccccaaggtgcctactttctctccttgcaagaagctcgacatcgagctggaacttgcttgctttatcagcaagcccaatgatcttggcaagcccgtcccgattgatgaggccgaggatcacattttcggtctagttctcatgaacgactggtctgcccgtgacattcaggcctgggaatacgtccctctcggccccttcaatgcgaagaacttcggtaccaccatcaccccctgggtggttctgcttgatgcgctcgagcctttccgcgctgccggtttggagcctgcaaaccgggagtctctgctcccctacctgcgcgagaagcgcgccgagagtgcctacgagattcccctcgatgttgaggttaccaaccccggtggtcagcccactattatctctaagagcaacgctcgcaacctgctctattctttccctcagatggttgcccaccacactatcacaggctgcaacttgcgcaccggtgacttgttgggatcgggtactatctctggtaaagaggccaagactgagggtagtttcttggaacagactaacggcaagactcctcttaagctggcggatggctccgagcgtatgttccttgaggatggtgacactgttattctgcgcggtatggctggcacagaaggcaactatgtcggctttggcgactgtgttggcactatcttgcctgccatttccctgcagtaaatgacttatataaaaaatcgaattgaaattcgatgaccaatgtttgatgtttcatttctattgtttacttctacactatagaccttggaatggatggatgatcgcccgctatactcttgtcaaatgtcattaaacgtcagtaccagtacgacgatgggatattctagcccggactagctaacccactatttacaatgctctcagctattccttaatacgaaactcatcgggggtatcgccctgtgatctccaatgccccttcttaaccgcctcttccatctccaagttcttcacaatctcattcgtaaccgggaattgacccaggtcaacaccaaaccgctgagctccccaggcagcaggaatcaagcacaaatccgcaatggtaatggaatctccaacgctaaacttccccgccgatttcttaacaacagcttcgtaaaccctaaagccatcctccatcaaatcctttgcccaatcagcacgttcagcccccagctgtccaacccgcttgagaatcctcaagttcgtaacaggttgtatatcgcaggagataatgtccgccaacgtgcgcactgccgcgcgggtctctggatccgaggctggggggagcaaggcgggcccttgctctgggaaggcttcctcgaggtactcaagtgcagccagagattgcgtgattgtaattggcgcttttgagtcgtgctggattactagggctggcactgttcctgaggggttgatggccagatgggctggggaggattgctcgccctttaggagattcacgtagacgggcgtgaaaggaacttgcttcaagtacagggctatccggagcctggcagagcaggaggagcggaaataggtgtggagagtgactgtgtcggtcattgtggctgaagggttggtgatattcgaactatgagatattggagtagcgataaaggtacgaaaagagcctcgggagaaggccttatgtgcttataagccaagctactcaattttaactacctgggtgtcaagtcactttccccaagacgcggatcttgtgtgccgttaccttgtccaggtggactcccttgaacatgtagggtatttggtgcggaacatattccgtcattttgaagccgagctcaagcgctgtattttatacatttcggctatgcctccgggagatatccagggtacatcatacttataatgcacatggtacttctaaatcgtattagaaccccgcgggcttgcagctttgatattctgcatggcatatatctgcgatttcttcccattattggctcttgaccgtccagcacggggcaacatcaccaatcaacttcaggataaaggacaatatgattttatccataaagtctgtccaatagacaacacactatttgtctatgttgtacggagtagattaattatcacctctagttagtgtgaaaggtccgatcctaatatggacagctatgtgcgggccggccgacggatatcgccggctaataatcctggcccaaccgcatcactttgtctccttgcagttatccatagcatcaccaaatacccacagaatccacttcagcaccgagaccctggttaatccgcccaggaacggttgacgatggatggtgtcaggtcagcccgcccggacaagccgtatcaacgcacctacaaggcgtgtatcccttgccggcaacggaaggccaaatgcgacctaggaactgacccaggtggtcttccgatcggcccaccatgtgcgcgctgcagaagggaactaagggagtgtgtgttccccgagaaacgggcgtgggaaagatcccgcaaacgaggtgcgctagaattaaatgcttaccatatataaattggctggtttctgaatggtcaatctctagcgcgatcaccagagagctatgaaactgatgtatcaccccgacacgccacgcaacttacgaagtcgcccgatagttctatccccgtacaaggacggacacagaacctgcaccatacaagcgacgtagctaacttaacgcccgagacaaactttcagaagccgcctggctttcagtcgggatggccatatcatcggggtcaagcggggtctcatcatggctctctcgatcacccttccgtagggccttcaaggactgaccagtccccttctcatacatatgaaaataacacgcaccgggcgaattccaccctcgcgagctctatgatgcgcactgtcgttacaagtggaaatgatgcactcaatattctcttcgaggctgcaactgctcaagaagatcatagtcctgatactgggtccgaatcactagccgggcctccatcggcaggtccgagtacccaaggtcgaacacccggaaactacgattccgcgtttgagtcggtggcccgaataatacgtcccgtcaagctatcagacgcaacacaagacactctcaatgtctgggaggcttgtcggtttgtcaagatgggctggttcactgctagagaggctgttacttttgttgatctgttagttctctcgcaagctccatgtctctgcgaaataacagctaacccgatataggttctataagaatatgtcatgtttgtctccgattctaactgatttttacgccaaccatcgatatcattactggctgattagtcgggagccagtgctatgctccaccattctcatgatctcttctcgctaccacgtccttcctggagcagggggagagtcaagaaatttctttatccatcaccgcctatggtcacattgccagaaattgacgatgcggctaatattcgggcaagagaagtcaacaaaatccaaagtgcgaagtcttggtactgtggaggcacttctgttgatgtcagaatggcatcctcgcgccctgcattttccgcccgagacggatggctgggacgatgatttgatccccgaagcccccaggacccatgacaataacgattcaaatccagcacctggcaatcgcggggtggaagacataattgagccagcacgccgatctgaccaaatgtcctggatgttgcttgggtgtgcgctctccctcggacacgagctgggcatattcgagccagaaggaagcatcccaccagccaacgaaccggaatggaaagatcagatggcaattcgttggcagcgcgtgcaacgtctgctatacgtctacattaatcaattggcttggcggatcggatgcatgtcaccgattcctcaatcattaacccatgctatactgggcgggcggaagccgcaaggattgagtccgccgggcagcacatggttgacgttcatggattcgtggattgagcttaccaagctagcaaagtctgtcactgatatgttcttcccctctgccgcttttgcacgccagcaactgcacagcggccgatacgttggtcttcttgaacatttccgacctctcctcaaccagtggaaagacaagtacctgcagcctcaggtgcttgataaagcattctacaacgatctattcatcgaataccatttcgtccgcgtctacacccattcagtgggaatgcaagcagtagttgagcgtgctgtcgcagagaacgaccccaacaattttgacggagtgcgacccatgaccatcgactcaacagactacgaatacatccaagaggtgattgatggatgtggccagatcctgcaaaaagtcacccatttggccgaggcaggggcgctacggttctctccagttcgaattgttcttcgcataactagtgcttcgatattcctgatgaaagcgctcagtctgggcacacggcaggccaagctccaggaatcaattgaaatattagaaaagagcatcaaagcactcaagtcgaatgctttagatgatgtgcatctgagcacgcgatatgccgcgctgctagacatgcacgtatcgcgcttgcgacggaatctgctcgcatcgtcgaaagtcgcgaaaggtcgagacgctccgcgaagttcacccatggggccccctccttggccggaaactggtgaccggtcaaatcccataaacacccctgtattgcagggctcaccaccggatatgggatttatcccgtccttgaatgatattggtgcagataactggctttcgttgccattcgacccatcgatggcgccgtttgatatgacccatggatgtcaatttccgatgtatgaaggtggagcattagactttatctggaatttgccatcttgatagagtccgctctgtacacagagtattcaattagatagctttgtaaatagctctgtatggtcgcaatcacgcgatgttgataatgataccccagttcggacaatgttactccgctttatatttccccgcaccaaacacaaccaacgtcagaatttcaaccagcgtaattacccagcaagatgtcgaaaccagcgtcatttaaacctacccttatcatccacggcggcgccggaaatatccaacgctccaaactccccccagacctctacgccgcccaccacgcatcgctccaatcctatctccgctctacacacaccctcctcaaaaatggcagcacagctctggatgctgccgtccacgccgtctcgctcctcgaagacgaccctctcttcaactgcggccgcggcagcgtcttcacaacagccggcacaatcgaaatggaagcctcagtaatggtgacatccgtgcaccaatacgacgtaacacaaccaggcgcaatcaagcgcggcgcgggcgtgatgggtgtccgtaatgtgcgtcatccaatccgcctggcgcgcgaatcgcttctcagatcgggtgtcgccgctgatgggtctcctgtaaatgatggagggagtatgcattctcagctggttggtccctatgttgagactcttgctcgggattgggggctggacttttgtcccgatgagtggttctttacgcagaagcgatgggatgagcatatgaggggattgaagggggaggaggagcctgtttcgctgactcaggggactgtgggttgtgtctgtcttgatcagtgggggaatctggctgttgccactagtaccggtggtttgacgaacaagttacccgggagaattggcgatacgcctacattgggggctgggttctgggctgaggcttgggatgagctcgtctcaggtgttggtgaggcagtattggaagattcttcggtgggtggcttgctacgtgaagcgaggaattggctcggtgattgcatgccaccgttcttacgaaatcagactttacctatttattcgtctctctcgggtgatgatgcctctcagctggacttggggcctgagaaggcatgtcgtccctatcaatcatctgctcagtcctctcgtcgacgggccattgcgctttctgggactggaaatggagactcgttccttcgggttgctgctgcgcgtacggctgctgcaatgctacggttctcttcgcccggtagcttcccttctggccttgcagatactgtgacggctgtttctgggcctggtggtgaacttcaacgttccgctggttccaggtggaagaagactggcgagggcgaaggaggtattataggtatagaggcagagcttgcccctgtaaatagggcatcggatgccaaactacatcggggtaaggttgtatttgacttcaattgtggtggtatgtggcgtgcttgggtagaggaagatgcttctggcaacgacgtcgagaggattatggtcttccgagagcaatatcaatagaagagcttgagttcattggtactttatatgtcaagaatataccatctagatttgttccctactgttcctacgagtatatttgaaaggtacaaaaatgctatgcaataccaaaaggtcttttgtcaggaccacacctatttcctatgccaggaagtattccggtgtgaaagtatcggcggacatttttggctatacatgtcgaaccgggcgaataggtacagtgctatgacatatagcctcagtaaaagtaaaagtacaggaggaaaagagacgctcgaagcaatgtacttacacccgcagaatcttgttcgaggacaacggagccggagaacttggctgccattttgtacgcgccaaatatgagcagttagacattgacctagaattattcagggcgcatacttcctaagtggagtagctggatccaaggtattttcaatccatagaatagggtgggccgggctcccgctaataggtcctagaaatggtcagatagatatcgggagaaaaaattgaaaatacccaataccctcgtatctccatttcggtcgagttttctatccccagcaaggtattggaaaagaggcccagatgtcggccatccatctgctctggctcttcaagacttggtaatagttttgttgagcgacgcgagagtcttatcaagagtgtccctcgttctttcgacggtgttgccagctgcaaatgagcatttctcgggcccagcctgatagcagatttcaaagaattcctcgatgatcttatcggtgtccacaacattcgcggtccagtaaccagagtacatactctgcgaatcacatacgcttaacacgatgagggtacatagctgcaaaggtcgcccccaagaccgtaccgtaggaaaatccccagtactgcagaagctctgcgccttgtttccatcgggttgccttgtgaattgcctgcctctggacctcgggaagggtcaacttgctggcaataatggcattggccatgttttctcgccattctccaggtcgctcgataatcgcaacgatatctgtcactgttggtgtagtattcatgaatcgccccatctttgggccgtctttgcgtgtacatgtggcgcctaacgccatggctcttccccaggcttgttctgttgccacggtcgagctgcctaacagatcgagaaattcattgtctagagatcatcgctgacgagaatgtggatctgtaaagcactcgtatcgtggagtagtactgttaatgccacggagatcaaatccgataatgtcatagtacttgtcttctgctgtctagggagccttggaaacttcccgtaagtttatgtctttacatggtaatttacctaggaattggaacagaatcgtactcactttaacagataaagacgtagcttgagagtcaactattttctggaggtgtttcccttgtgtcaggatcatattgacgcccgattcacccggccctcctaaaattaattagcttaatatttgtaggaattctctgtcgaacttgcctgggttgaccagaatagctcctccatatctggggtctgttactgatactacagcagggagtttgattattgcaagagcaaccttctcttcgccattatttgtgctgttccaatccatcggtacctagagacgggcgcattggtagctatcgaagcacggagtatatgagagtttttccgacggaatgatctagtgataatgtgatgagcaataatttgttaatatgaagacgaagaagtcataccaatctccaagaagacactcggtatccatcgtccacgagaccgtctgaatgtggagcaaccgcccgataaaacatgcgagtaacgaaagtaaactaaaagaacagcccaggagaatcaatagccattttgtccgacttcgaggataaatgagatgttgtggtcggaaatcgttggatttttgtttccccatatttgcagactcccgtatgtaattgggactggttgaggttatttgaacccgtggaaccccgtggggcgatgttgcggctccacatgttttggcatataccacgtgaccaagcacctgactgctgcttcaggtatcaactcgggcttctagtcgtgatttaagatgcatatttgtactctcttgatatgtatgttagatataacagtccacataaatacagattcgggctaattatatacaaaagcactctgttagctcgccttgagcgatgtaaagacgaaaccactcagaataccagcgatatatactgcaagaatcacaaagctaacaagcacatcggattcagatctaccatccctccaaaggtgtaagcaaagcaagcaccccatctttaggggaaacagtggcgctttctcgaatctccaatttagcatcaggatacttgagctccatgtggaaccgaccgacgacagcagcaatcaagcaagccagctcggacttcgcaaagccctgcccaatgcaactccgtggcccatgcaggaaagtcaaaaaggcataattactgaccgcgccgccggtattagccttaccgggacccataaagcggtctgggttgaattcattcgcatctggtccccacagctcttccatccggttcaggatttgcggagcaatgatcaataccgtatccttgggaatgtgcgtgtcggcaagagttgtgtcacggactgccttgcgtatggttaacggaacagaggggtggaagcggagaacctcgttgcacactgcgtttaggtagggcaggttatcaaccgcggctgcagagattggagttgggtcgccgagggaaggaagattggcgcggatttcatctcgcagacgtgtttggacgttggggttcttgcagagtgcgtagacggcccactgtagcgctgtggcagttgtctcgtggcctgcacctaagaaggtcatggattggtggacaaggttttcttcgtcaaaggtgccgctacttagtgcgacggagataatgtcaatgccggtttcggctttggggtcttccatctttgccttcttctgtcggatcatctgacgtgcgacgttgcggatgatctcgccactctgcttgatatccttgttgcgtttcgtcggtaatgagtgggcccacgatggattaccgaatagcacacatgttacaaaaatgattttcataatgagcggtggcgaggacatgattttgcggtaggattggttgagggtgttctcaggatcacgaagagagtcgaaatcatggtccataccggcgacgccgatgatgtccagggttgctctactggcccagttactgatttggacagttttgtcgttattgccatcggcctttctgctccgaaggtcatcctcaatcatcttcaccatttctacactcttggcccagaagactgggtagaggttcttgatgtggcgataggcaaaggctggcataagattcttgcgttgcgtctagtacattgtaagtttgagtccatggaagtgggatttcgggggccagatttaccttgtgctcttcaccttcagcaagtagaattccatcacctgtgatacgccgcaagctctgccgaaccaactctggtttttcaaagtcgtaaactttcgtgacaagaagctcgcccaatgattttgggcttgtcaaaatcactctttcgacatttccgacaatatagtaccgcaagagatcttgattgggtctgcttttggcccactcccgtagctgcggaaatggggtctcaagcaagaaacttggagaattgccggtgagccaacttcgaccctagatagcattagacaaattgacaataccatatgaaaaagggctggcctaccgcaggtgagtaaatgtgtttcaatggagtgaagtagtcaggatataagacaagccgataaacaatcctgaacatagtaataagcccgaaaatgacagcgaccgtcacaaccctggaattgaagatagcatactccggtttgaagtagatcccggcggcgaggccaagatagagaatggggaggctatcgctgacgcgctccattgctagatttttcggaggacccgggataaacaaatattgtaacttgacggctcaaatcacatatatagagagtaatagatgatatcttactggatatccaacactgcctcggttttgattaggtgtccagcagccagtgaagagccccgtgtggggtgtagacgagatgacaaaatgcttggctctcgttggttccggtcagatctgaatcctacacggagtacagtcttatagatagcaacgaacgcgcgtagatgacctctgcacagctgaaatgagtttgattcgagaaattccaggagagatgacagagtatggctttgagatggttgcctggagtgggacatacgagaaacacgggaacagatagaacctaaacgaaaacgacagcaattactacttgggtatgttatagctcaaaaatagaaagagaaaccgatgatataccgactatacaaatatcatatgtaccggataatgcctggaacttgaaccctttccctttccgatttagtgcttacctcttaccgctttttgatcactgaggaaaacggagcacatctctgagtaacgtaattcccagccgagctgcgcaccctaaccaacccattgaattttgacggaaaaacggtggtaaggcgagtgtatttgtggcagaaaaatctcaataaattctctaactctctaaaactgacaatagtcctaaaacatgacaatctgatggacaacttagtaatcaaaacaaacaaaacaaaatgaaaggatatttttcgggcgaaaaaccttctgagttggtttttctgcagaaaaaccagtctggtcagtcacgtgacccaactgtatcagggataaaaaatgatagtatttatcctagattctgacataccccccagcttttaaagtgattataaatcagggctttaagagctgttataaataacaaaattttccttaatatctgcttttataactgattagataactaatcttagatattctaagtaattccctaaactgttcttgtttctagtagggtaaagcttttgttaggctattagtaggcatttctacagttagaatctaatctatattaacctatctagcgttaacttcctgttttaactagtatattaatatctatatagcggagctttatatatattaacactctttcctttattaatagattaatagtctagagtcaggggagacctaagtctgccattgctaaaaagactcgctgaggctgggtgaaaaatcggccctatttcttctagaaagttcactgctttcgtcacactacattttgaactataaggaatggcggaagttctatatcatctatccagaaaggaacaagagcgattggattaggaataaaagtaagagaagtaaacgccgtatccaccgttcaaagaggaaaaagggactgtttagccatagcaatttgcgcctccatgcgtaaatcatcaagtgagaatgaaaaaatatcaagtggtggacgtcccggtaaaagagcgtttccgaacaacattttccgtgtgactttaatgggtggttgaggagaggaaggtaccgggaaaatggcttcatcctgttctttgagtggattaccgttgttgtccagtcgccaaagttcaatcgtaccagcaacaccggctcgtctcttgaaccacttaatcaatatcacagcagtaatttcaccctggcctccgatcagtaatcttcgcatgtcactttcaagaaggggttttgattcgctatatccgatttcgaagcagagcgtgggaagattgagaccatggacgttcacatgtacatcaggttctttccgacaattagcgtagacgccccgtgtgagtgtgatcgtatccgcgacttgggctttcatcattctcttctcggctgtcgtcagaagcccggcttctatccacttgtctcgtgcgtcttggaaccagattagggcacaattatgtagcggtgtaggtattttgatcataaaggttccagtattaggatcaaaggactttcggagtgcccgtgattcgagttgttcaaatttctgccatagttgtgtaccgacatgtggctttagctgggtaatgacgagtagatcaggggtattgattcgttcgcgttggatgaggctttggatggttgaatagacacgcacagcagttgggatgttcgctgcagagacttggatggggcgtaaagacttgttaatttcatcgtgatcagcttcagggagatgggaagtgggggaaccaggttgttgaggcgatgaagttggacacgaaaagcacgacatggtgaagacaggtgggaaggaggcaacgaaaatcgtgaaacgtcgaggttgtagcttcgggaaggatcgttgagaagttgtaggtaactagaaggaaggagcgttggcaacattgacgtcatgcttatgtaaggtaccctaaggcgggagcttacagaactaaaacaagagactacgatgaggcaaaaagaagcgaaagaacactgaaagtaaacgctcttgatgctgctgaaactgaagaggagaaaacaagaatccaagaaaactggatttttgacgacttttgcgaggaagaatatacgtaaaaaaaggctttgccgctgttcatgtcgacagtggacagaaatgaggtcacaagaatatcaggggtcattgtggtaacgaacacatgcacgtgcgatgcaagagcttcttggattacatcagtacaccaatggcattccttatatctagtagcacaatgccttcccgtcatgacgaagcatcggtagatttaagcgaaataggaagatagccgtctagccaatctcagagatcattatggttacgaccacagtcaacacgtataaaataacagaattcccgagctacatcagcaaaccgatggcatttccttttggtctttcgctaaagatagtcgttggttcttcagtgtcgtgctccagtatacctgtatagagccttgagtcctcccgggaaacttttgaacaaaacgcttggtcacttctgaccaggctagtttctgttcttccctgagcgtcaccagtagacgatcctcttccacagaccatgaaaggccttttctcgagggacgcgtatactcagaagtatccgttttgccgctcgtgcttgagttattaaatgtaggcgctacgtctttttcatgtttcgaaatgtagcttgacacagacgtgtcctttccgctcggcacgggagcgcaatgcgacaagacaatcttaaacagtcaggacaggaactgtagtctgtcatcggctgagagggcagagaattgagcacgaacagtggaaaatgaaacgtttttacggccgagcccttaagcgaatcgactagtctgatgcttggtatgaatttccacgacgactgcaactttgttgattctagaaggctgcctgccaggtttcaccgtcctcttcgagctctgttgtctatcattagaacaggcttccttatccaataatcgagatttactagctgatggcctatctggacggactctaacgcgaggcgcaggctctaccgcttaggtctcctttaatacccgggaagtgatactcatctaggattgccgggtcgattgatatatcgtctgaaagatctccaggctggataggactattaggagacccaacttgatagtactgaccagcagagaaagcgaggtccagctcgcctgattcaaagctggggagttggtacttagaatcatgataaatattatggaaaatcggtatgcgattaacgttcccagagcttagtagatcttgtatatatagaatttcttcgaagtcgaacgtctcaatgtctggattggtggatgacggggttttgtcataaaagcggcggcagctcaaataggaaagcccacccgccagagaaaatccggtacgtatagagacacatatataacccgggaacccatgtcgagctgtatatgacattcacatggtctggcattgattacgtcatcagatcggctggcacccaatgtccgtcaacatcattcacactcttaaggactgttaggactagctactagcatatcctgaaatggaggtttcgaactagagtgggggttcccaagatggctcatgcaattcagtagactaatcgctaaggttctaatcctctgtgcgcggcgtgtgtgtacccctggcgcttacttagcgagtacgtcgagccatacgggccagttgtgcaggtgaccctcggggtcgtaacaaggacataatggactcttcgccagatagcgaccctgtcgagacagagataattgaatctttcacacccgattttgatattgtggatccatggttttgactcagtcaacctcaccagaagactagccttcctccatacgcacgatcaataaaaatcattgtcgcgacacagcgtcttagtgataaatattaccagagttggcatctactcaaggacatggggtcaccggaagaaagtgccaggttaaagacatggaaagctttgaggattggaccttgatcctatcgaaaatattggacaatgtcgatgtgatgtcaatacacagatgcccgtcacatattcgaagttataagtcgcataccctgccaacctaacaaaggcgatattattataggacgaagaatgggaatatattattaaatcgaaactcaaaacatcaccaaaaagcaaattctcactcagacgtccttcgaccctatgattctatcaaattcaccaatcgtatgctgccaaaccttctgcgccatcccctccgcgcgaagtccagccaacaacttcacaaccttaggaccagcgtgctctccattccagtgaatagtgtaaacaccactcccaaccttcccatccgtcccactggcaacctcaacctcctccgacaagggcacaccagcggaattccccgcggcatccaagcagacacggggaggatatttagcactcgtcgcaaagaaaagatgtctctccccggactcccgaatcgggatgtaaaccaaaggcccgataaccatgagcacgacattcataagccaggtcagaaaagtattggactcgcgcccaatgcccgtcttgactgcgccagggtaatcgataataaatgacacttctggcgcttgctcggccagtgtttccaaaaccatatcagtcatggacaccacatgtccacgtagcttcagcattgacatcgtccttccttggaagtcagtcacgtcgatgggaccttcatggccgccggcgagaacgctgaccacgcgccgtaggcccgttgcttgtttgagattggggaggaggttgatgatgaatcgtgttcgagcgtagtatgcagctgcacccaagatgtggaggccttcggatgtatctgtttgcatattatgagcaataatgtctttttttatttttattttcttgtaagggatgtggggatgtcctgcctaccttctccggaacgaatagttccacagctgaggaagaggatgttgatactcttttctttgttttgaagctcgcgacagaccttgtcgacgttccgaatcaaactgacgtccgctttgatgaaggtaaattctccctccgggttcagctgtcggcattcggctgtgatgcgggctgcggcttcttgcgaccggccgatgaagtatgcgcggggcgatcgtgctgagcgggcgaactcttttaaggctgcttcgccgatgccgcttgttgcgcctacgaagactgccacgaggcctgctgggagtgtgtcggcgatgtgggcatttgaggactggacgtctggtagagagaccattttggatgctgtgaactgacacaggaaattctagcttctatcgattatggaggttaaacgagggtatgatccatgtatttatactccgtatgtagagatatttctcgtattgcgctgtgttctatattcggtacatctataggccgtctcggtcggaggacggacttagccacacgaggcggaggaatgaaatcccccgggaatttatccttatgagaataaagtttcgtttacttgtcgtattcaattaaaacgtgaagatataattaagagatttattatcagaatatacaggaatagttggtcgcttatttggcctagacatgtatttttttaggtacatcactcgcaacatattgcggaataggagcgactgaaaatcatttcaaaaaaaactcatagattattttggatcttaccatattcagataaagcccacttcaccatccattctgactcgagaatttacttggtggtaggacgatcctcgggtctgaataagagcatctgtcgtaacatgtcgaagagagcgtctctttcccttgcatcaaacgataggatccccttctctcgcctaggcttttcaacgctatcctcaaaccgatcgtcgcaagatcggaaatatatacggtttattggcttaccatcctcggtaaatttatgctgtcgcgcctcccaccttctccaccattcaggcggcaaaacaccaagagtatccacatgttcacaggtcatgtcgtcctctgtcgcgagaaattcttcaaataatggccgttgagcgatgatagaccatatggtacaggcaagagtccaaatgtccgatgaaaaagaaagaggcttatttggttcaaaacgagcctcggggggccggatacctcggagggtgcgagattcgtatttcagttcttttgagggcgaaaaggcttcaccaaagtctgtaagtaggactcgagcttctgcaagcgtggtttcctcacttgcttcacctagccatatgggcataatgccatgggatgggacaccaggaggcagcgatttgctatctagatggacaaccgggtccagctgcggtactccgtatttctcatataattgttcgagtgagagttggtcgaaactgggcgcaacttttagaagaatgttgccgaggtgaaggtctccatggacgattccttggccatgcacataatctataacgagaacgagttgtgcagccaatgaccgggctacatcaggctggaacacgcggatccacgaaccatctttcagcccggagaggctggccctcgccgtcgctgtaacgtagcaaacgtgattgccatttgggccgcgaatggtaaaactatctagaatcgaagggaccatcgcctttcctggattgttgactagagaacaatgaggacgagtgagagtgcataagatatccacctcctttgggttcgagtctgctatgaaaacttttaccgcaacgtatttattggattgttcatcacggccgagccacgtagtcgaataagacccatatcctagcttatgaaccactcgatatcgactgtgaaagtgttctccgattttcattgggtggtagccccctggtcgataattctctattctttcgactccctcgagaggctcgtagaggaaataggcggtggaatcatcatcagtctctattgacttgaatgcggtgagagtgaacgcgcagcgtggttgattttgacgcagcagtggcatgagcacctgccggcggataggagaatctcggtaacgtaaaccattcgggcgtaacaatagaatggacaatgacaacagtttactcatggtatatgtgtacaggttgagctgaaagaactttaaagaaggagatagaatgctgattaaatgtaacggaacagcattgatggttgggagaaagggggagcttgggctggggtgaccgcccgcgggtttttctcgatcttcggtatcagacatgccagtgtcaagtatattcgatggaatgcgaaagcagaagcaactggaatagattaggcagactgaattgattcaatgccttggcactgttgtataggaagtgcttgtccagtcttggcgttaacaagctcacagggtcaggtgatgttgcctaaaatacagtgagaatgagattcgagacagccctcgagtatatcagaagatccttctcaacggaagcgccctgagaagttaggattgcatcatccaactgtgtagcgcccggagacagagcttatgcacatggaccctcccctggcgcgtgctgatggccagtgagcagtcagaatagagtgctgaaggatccatcttcccgtctgtctcagggtgttgaagtgggccagtggcagaatgttgttgtccctccaagaatagacatatgcaaattaaaaccttgatggatgcatgcaaagatgttcccaatttagaacatccaaaacagaccgaacaaagagatgaatggacgaagagaaagctccctcagccttaaaaacacccgctcgtgcctgtcccgcgtccccacccctgccgaactcctcttctcccctcaatgtgtttcacttcttcttcccctttttcaatttccattccaacgtcactcatttcccagccaacttccttggaaagttactacactcattcaaccctatttctatcggtaatcgcgcattctttctccatataattgtggcccttttcttggtatatcggcggtcaatgaaagcctgtctattgtcgctttcaataccccaatgcgcgtttgaaacaccagcgcttcattgtgatcatatacacgtggcttgcagccctcgatacctgatatcgtgatcaacctctctccttgcattccgcaggtatgcgccactcgcgcggttaatatactatcattcccctcgttgcgcctgaattttggctctctctactctttacacctgcttcaaactcaattacgactttgcccggctggcccgaggaagtcgacctttgatcgtccgtgatccgccattctctacaatcctcagtgatcacttcgtgatcactccctggcaggaccaggtcaattcacacaatgctgtgcggtggagaccgtgagaagggggatgtggcgatggaggagaaatgggactatgtggtatgtccgccccaatgacagtgttgtatagataactcggcatactgataatgactcccttagaacttggatgacttcaaatctgagtcttgctggacccccttctcctattttttcatatggttgttcctatttatctcgattgcagtctacggtgttgatacattcactgcagtcaacttgctggctttctctcgatggtccggcagagttcaacccgccattcccttcaatatctcccggtggatcttcgccgcctgcatcattgcttctttcattcttttggcctacagatggatacatgcaatccgctccatccgctcgggtagtattactcgcagctttctggacccgttggctgtgcgtatccaaagtattcgcctgggcaagcgcggtcgtggatacaggagattccttgtcttcgctgaattaacgaaagacaggaaagcagcagaatatgttgctctgtatgcgtacttctctttccagtgtaagcatactaccattgactaactgatcctcgaatataactaacggggcttttagtctggatgaacacgatcttcgcagatggcccgcgtcaagttctcaatgccatcactctctattcggtcatgcaaatggacctcattcccgggggcaagaatgcagcccacgacgatggaacttcctcagttggtcaattcttcaacaacgtcaagattttggccgaggacaacaaccttcaagccgtggtcttgtttggtatgcttttcaccctggtcgtttgggtcctatcggttctgaagttgatatcggccatcgtactttatttaatcttcctcttccaccatatcccagcggaagatggttctctttcgaagtactgccgtcggaaggtcggtcaacgtctgaagcgtatcgtgcaccgcaagaacacaaaggccctggcgaagggactcaaattacagaatcgagcacccactcagccaatgctggccatggattcgaacccgaccctgccgtctttggccgaagataagcaccccacagtggcttcttcgttgtcgcgaagtaccactcagaccaccttgccgccttactcgcgatcggcttcgatagcgccgacggccaacccgacactgccgaatctggaattagatgccaaaccgacactaactcgaactggaacttcatcttcagcaatgtccgagtccgcttcactgacaagcaatgcggccggaatgggatacagtcctcttgatggccggaggccgacgcttcccccagtacctcccttgccctcaaacgttccatcacggatggccactcctcactcccgaggaactcctgcgccatatgagaatgatggtcgtaatagccccggtcctggatatcgcaacttgactgatagctctgattctcggtcatatcagagtcacactccagcgcctgattatgcttcggctgaaatggacccttccgattaccacgattatttcaaccgtgacgatgcgccggctcactacgatccctacgggcctccaaggggtacatccagggaagccgacggttatggaggaagatacgggactcctagtgaccagagaggcgcgcctcgcgcacagcaggattactacccacaggatccatattcgaacaggtcctacacaccggctagcactggtgggacgcctgctccctatcggtcctacacaccggcaagcactggtgggacgcctgctccctatcggtcctacacaccggccagcactggcgggacccctgctccctatcggtccaacaccccggcaagccatcgacccacacctcccccacaagccgcattggcacagcctccaccaaggacgttcactccggtgagttcggcaactcccgctcctcaaaatggtggctatgcagctttcaacccgtcaatggttcaccaaacatctcagcctcgctctaatgggcctcccggtccgggcagctttactcgagcaaacaccgcttcgccctcggccatgcatcgtgctcccccagggcacacattcactcgctcaaatacccatcaatattgatgaggttcaccctgtaggcctcatttgaacgccatgagactttcctatgatgaaaaccaggagctggctctcctgtggttgatgaccggatcactcgctaatactgatcacgaccagcgagcctctctagattctgtacatacccctattctcctgactgtgatatccttaaattcttattccccatgacatgaattgatctctttttgtttccgaattcactacagagaatgtatagataacatgtagcttcgaagtaccattggaatcttgatatttccttctattgcgcgattccatgactcaatatcaatcagaaacaggatgatttattatacacctatacataaattacctatacaatcaacacctccccacgatccacaacaaacagcacccaatcaccaaatcttcttagcgatcatctcataccgctgtacatgatcaacactaaactccccatccttactcttatccttttcctccttctccttcaaccgccgcaatccatccggatcatccgcatagatcaacttccgcttctcatccccaacctccacaacaccccacccaccaacgcgctgactaccctcaacatggaaatcgcgcgaacgaggtgccccactctcagtaccagactggttattcgaggactgtttgcgctcgctctcccgacccttcatcttcctataacgggagcgcgcaaaggcgagcaggaccatgcccagcagcaatttcaggatgagcaggacgataaacccagtcaataacaagatgccagtgaagatatggacggactgggctggggacgggatggcgttttcgaggagggtacggaagaacgcgctgacgtgggcggcggaggcggggatgagggttgctaaggtcaagggcggggccgacgggatcggagagggaacgtagtggttgtggattgatgctagggaggttgctcccattgctgttgaggaggggttttgggggagtagggcggctaggaacatttggtaggtttgcacggagacccggaagaagaggcaggagagagggatgactgggaggccgatgcggcgggttaggttctgttcgccgaaggcgttggtgtaatagtccttggctagcacgtcgaggaagcggccgtagatggctgggcggttgttgttgaatttgttgatataggcgtgcttgagccagtctactagcatctcggagcctagtacaactagaaatggacctaggacttgggctaaggtcgggatgaaagaattgacgctgtggaaggatgatagaattgaggatgggaagagggtaaatgcttggggcaggatggatgatgcagtgcgtggaggggtggatagtggtgtgctgttcgtgattgtggaggactggcccgggaagctagatcctagcccgaggttgccgatgaaattgaatgcacctgtctccacgatattacgcgaagctatgatagtaagcatcagccatagctggaaccgttccacaacgtccgcacaggtaagttggaagaggttctctttctcaaacttgcggaagacggtagatttaatctccacaaattggtttgatagaagtagcgtaatcaatgcgttggagtatgaattcactgccacattcaaggtcatgacctggtagaacagagacaatgcatgagatactgtgtaaaccagtgccactaggaacagccagaatggacgaatgatcttgcttcggccgtccggacgacgctcaagagcctccctcgagaagagacactcgaggacatcttgacctatggcagctaatagcctgtcactgacctccagcacattgtagataacatatagcttgatagcagcctgtccgcgaatccagtgatacattcgactcgcatcgaagtacatcaaaacacagcaggtagctatcatcagcaggcctgtcagaatgtccgctttgtcgtctggaaggagcgccgagggcatcgacttcttccgtcgatggtgatacttgcgggattcggaggttcggtgtttccttcttggtgtttccgactgtgactgtctggagtctctatctgctggtactgtgtctggtcctgcagacgagcccgaaggaagatgaggggtggcgtcagattcgctttcgggtcttccacgctgatggtcttccttcgcattatgatttctcctgcgccatactcgaccaatcccattcagcacaaatttccaaatgaaccgaatctcagctcccaagttcatcacccatgattcgcccaatatatagacagctttgataaaccgcagtggcattatcgtgaaagagtaaagccatgcatcgaggcaagcaagactcccgaagcaaagcacctgctcaagcataggtgcaagcataatgaaattcataagcctctcaatcttcactcgtgatgattcatatgggaagtcattggccgcatcacggtggatgtacagcggtgaaggtcgaccagaagcaagctcaagctgaagataggttggcagagaaactggcggcaaaggaatagatgatggcgagggtgagggcttgggcgattctacaatctgaggtgatgcaacaaggtgactcttcaaatcgcgttctaacgcgggtcggtcctgtttcgggcgcaacgcccatgtctgggttaggcggtcattacttggggtaaggggcagttgacgccgcgtagagccaggggtggacaatgttcgtgctggctgcggccgattgcggagggatgaattttgaatattccgcgggaaggcaggactcgccggtgtagaagtatctcctggcaacacttctttagtgggccgcaactttgttaaaacatcagcgggtgaaggcctttcgcttagtgactgaagcgcaacctctggtatctccggtcgtgcgagaggagcatttccatggacgttgtccgagacaactcgccttccagggtttctttctagtcccatggggcggtaaggtattgactctggcgaggacgtgagctcctggatcttctcaggagataatttcatgaccttgtctttatcctctgatagtcggtgagacagatcattagacaattcagccaatgactcggctaatgtcgccttgaccttggggccatcgtacacatcaactaccgacaactggccaatattatccctggtgttcggtgaatgttcgaccaggatgccgagtccatgcgcggattctaaatcggctattttatatgctccgtttgtaaggtcccgttccgaggttgtatcgtgtgtctgttgctcatttgagccatcgtctccattgattgggcgttcgtcggcctcgccgttggactgcaccacagtatctactcgactgcatttctcctcaacagtatagggcaccaattgctgttgagacttcgagttcccactggctccgttttgaacagtattttcagccatcttccgcttgtgacgaaacctcactggtatctgcaacaggactaattttgacgacccagcaacccgcgagaagccaacgtgttccttaaaatacccacaagcttgcagtatcacctcttataccatcagaaagtgcaggggtctccgactcgcatcgtctaaattggctcgtgacgagtgatcaagctatgttcgaaggcgaagaggcgtaaaaagagatagaatcgcaaaaatggcgtagtttgttgcattaacaattttgttcaaccagctggcacatcctgaaattaaaaaaaaaaaaaacgacgcactgtctgagctgtttgcttgttgatgtcggcgttgtctgggggaagataaggatggcaggttatctggcaggtcggtgagtcggaggttagcgccatcggtgctcggacataaaaaagtaaagtaaagtcacgtgcgcctggaatagggagttttttacccctggaagggactacaacacaactcaaaaatgtctctattctcactgccaacggagcttttgctccttctaacgcataatctgcaatatgcatccgagctcagcgcgatgtcgcaaacctgtcgccggtttcataccatattcgatcctgagctttactcacgatttgcgaatagctgtgaattcaacattctgcgccttgtggaaactggcaattcagacgctatacaaaagctaggtctgctggttacaaattgtttgattttctagaaacaccggtggattggtggcagccatgtgacacgttcgaccttgaccgtaacttggaatctaagtcttccatgaccatcgcagcacggaatggtcatctgaagattcttcagctttttgttgaaaatctgccttcaatcattacaaattctgctcgatcttggtatcttctgatgcacgcggccctacgtggtcagttacatgtagtcaagttcctaattggtcagggtgtcccagtgatccatgttgacaagtcagcgcgtactagctcgattgttgatgctgcagttttaaagggccatttgccggtggttaaatatataatcgaggagattaaattcgcggatcgatcacacaattcggcagatcctcttctttgccttgccacacacgctggtcatttggatatggtcaaatatctggtcaaatgcggtgcttcctttacttgccaacacttctacccttttcgtggctcggccttcgacattgccatggacgagggctgggcagacatagcatcattcttcctaggcaatgcaactctagaagatctagatatcataactacaagcggctggaaatggatgtcgaaaccttgtagccaggataaattcggacatatattctacccatctccatggaaaaagccatccattgcccatatgatattggaccgagtcgatctggagaaacaactgacaacaattactccagataacgaacaagaagtgcgaggacgacagtttcattatcccaatggacgtccacggttggaccacatacatccacgctcatcaattcaattgctcgtcgagcatggcgcagaaatcaatcaagtggacgcaaatggccgaaccgctctgtttttaactatagaaagaaacaacctcgtcttgacaaaggaacttctcagactgggagccaaccccctgctcaaaacgtcggcaaatgtcagcgctctcgagctggccatttcaaagtgccaaacaaagcacgtgaaggcatttttgaaggctattgagattcattctttcacatgtgacaactttagtagcctcaatcctgacgttctgccaccggagaagctgccgaacagagctcctacatgtgcaagcgctcaatttcatatttttgcgaccgattttctttcggtagaaggaatcattgcaagaaatggatggatggatcaacctcggggatcacgagttccagtatggtgtcggaaatcgccgcagaactgggaggagattttggaggagagctctgaggaaagttcagaggaggactcggatgaaagctcgggtgaaggctcggatgaagaatgggataattattcggtgagtttgcagaaggagggtaccgaggaagataactttgtaccaatttggtctgcaaccaaggatgatgacagtattagcgatcctcgctgggcgcgattcttcatcgcaaaggccatgacctaacattactggcgaatgatgtacctagtactagtttagattggaactgaaaggccacggaagacatttataaataagagatctgatttgttaactagatacgaatgagtatgctcaggtgctagactaccacctaagaagccgtcctttctgttccatttgactgtgcaaaccaggactagggccttcacaaattgcgacacaaaaggattggccagttctaaaacaagtggaagcatctaatcgtgaaggcctatcattccagattcgcatctcaatcatgtctttcatgtggtattccataactcaatgcatatatgctaactatcatcggatgtacgtcaagtgacagggcaaaacaatgtatggctcaatcccaaagcctctagatctaccagtagccagggaaaagccagtccagcttctccttagcctcgggagtccagttagtctgaggggtgctaacaccgaacttaataccaccagccaggtgcttagcctggactagctcggcgtgctcgtcgctggccagggcatcaaggacagcagtcacgaagcgacgagcgttttcggcgttagacttcatgttgcccattaccatctcgacagtcacgtcagcggtagcctcgtgccagcagtcataatccgtggacatgcaaatcatctggtaggcaatctcggcctcgcgggccagcttggcctcaggtagagcggacatgttgatgacactgccaccccatgagcggtacatcttgctctcggcacgggtggagaactggggtccctctgtacgatggaaaagacatggttagtaatgttttgtcgtaaggataagtcacagcttcacatacccatacaaatcagagtaccgcgatcgtgcaggacgacaccgtcaccctcaaggctgtgtccgcactcgcgcaccaccttggcaacaccctcatcaaatgggtcaccgaaggggacgtgggcaacaatgcccccctcgaagaaagtccacgggcgcacgcccttggtgcgatcaatgacctggtcggggatgacaaagtcgcggggcttgatttcctcctgcagactgccaacggcggagaaagcgatcacgctgcggacaccgatggagcgcagggctgcgatattagcgcgagcgggaacctcatgaggagcaatctgatggtgcaagccgtggcggctcaagaaggcgacagcgacaaccttgttgttgtgcttacactcgtggtgcagaatagtgatcggcgaggaagggacgccccagggggttgtgacgttcagcgaggccacttgagtgaagccaggcaattcgcgcagaccggtgccgccaatgacagcgatggggacgggccctgtcagattcaatatcgtcagctttctatcgtagtgggggtatgaggggtagaagtgagggaggcagaagcacacgtaccgtcatatgtagtagggagagaagccattcttcgagcgagttgtttcgcggactcaattcgacggaatggtttcgatatagaagagaatgaacgtgagcctaagatccagcgcatcttgcgccatcttcaaatttctgaggctgcggccaacctgcgtttctccgattggttgtttgctgacccacgtgctgtgggttcctgaggccgccacctaccttttcgggacatctataaaactttaatatacatttacatcgacagtccctacgcaagtctccgtacacggagatatatatttgatggcgtatgggttgtatgaaaacttttgcggtaaaattgtacactctacatgtctatcagggtcacagttgaccattgatcgagaacatcttcaaaattatattctatgcagtcaaatacatgttcaatttgggataataaatacaacctagatgacaagagtctggggtaatgcacttgaattaatttaagccggcagccactcgtagtggtgagggcccttgtgaaccggtccaggatcctcaccgggaataccaggcttgttgtagctgtgtgcaccgaagtagtccatctgcgcctccatgaactgggtcggcagtcccaatccaccctcatacttgagatattccagagtagctgagagagccggaatatattgatcaaacatggttccctccatgacaacttgcttgagactatggaagttctggtgcaactcatgtgcaacagtatccacaaacttggcgtttgtcagctcattttgggctgcaagcggcggctgcagtagatccgcaatgtaatcagacttgatgatacatcccgctcgccagatctgcagacagtcgcccaaattgaccttccagccttcgtctatcgaggcccgggaaatcagctccagcccctgacagaaagatgccaggaacgagcagtacacagcttgtcgtaggttctcgataatcacattgtggtcccgggttccctctatcggtttcggcatgggcatctccagcttcttcgcaacacgcgctcgctccacgcgatttccacttgagattcgcaggtactgggcagccgctaacgtcggacaagagacatgccgggcggcagactccataacacaccagtgtggagtaccttcagtaccatcgtcgtcctgaaccaccttgtcgaggacatcatcgagcacatatccatcatcccgactggctccctcgcctttgtagtctcctttgggggttctccgtgtgtgtaaaatcttggcgccgatgttaatcaggaagttgccccgcagctcgccagtctcattccatttatcgaagacatctccgattgtgccatgctccatgccgagtccctcgtgcatgtattgccatgtttcagcaagtacagaaagcattccaccctcgatgccattatgaaccatcttgatgtagtgtcctgatccaccgggacccatgcgcttcacgcaggcagtcccagttttgggatcatgggccgcatacgactccaagaacggcataacacgctcgatggctttggcatctccacctggcgagagactgggtcctcgtcgtgcagattgatatccacccgagacgcccattccaatccaggcgacaccgatgtcagcacactctttctggcgccgctcggtattccggtagttctcatttccaccgtccaggatgatatcaccctctttcaggtctggtttcaacaagcgaagtacttcatccgcggggtcaccgtgcgtgatagaaaacatgaatagtttgtggtcggacttgccctctaggctcttggagaattggttgatgtcatagaagccttgaactcggcctgttatagctttgtcctctttggcgtagcgcaccacttcgtcgacgttcttctttattacatcccagacagagacttggagcccgagctcagcgaagcgaagggtcatcatagagcccatgtttccagctccgacgacgccgatgcttttgatggtggacattgtgaattggtcttgattctgtcaggctagctaagtgatgcaaagttcaagtgggaagtatgcgggaaatatttacaagaaaatgtctgggacgatcatcgctcttaaacaagaagattgtggcggtcggatctgtgatccgagcatagtcaatatggaatcagacacgccacgaacaagatttgtgtagaagaggcaagtgaggcgaaattaattgttgtagtgtctatcaaagactcacattatggccaagctcgatctgggctggtatgatacaccgatgacgacataagctctaaacaagaacagcccagttcaacattacatcacgatggacacagaatgaaaaaggaataggcgaaaaagaaaaggatgaggcaaatatatacccaatgataccaagcatggcaatctcccattcaagctcttccctcatacgtccagtgaactatacgtcttcgcagatatcaacaagcctcaacaaaatcacgatccactatacaatcttgtttgacagattttagagggaaaagaaacgaaaaatgtcaattccctactcaagtctccaaaaaatccccctctcatacgcttcctgctcaatcggctgcggcccgaaggacacccttccgcgccgcctcgaagcaatcagtgaagcaggcttcagcgcaatcgagctatccttcccagacatcttagacttcggcgcgctaaccactggccatcacatcgggccagaaaattacactgcaattttgcctgtggccgtggaaatccgtaaactatgtgaagaacgtgggttgaaaattatgatgctgcagccattctcaaacttcgaaggttgggtcaagggctctacggatcgtgaggatgcatttgctagagccacaggttggatggatattatggatgccgtgggtacagatttgttgcaggtatgatatggatatatatatgttgagcacgagcaataagctaatgacatatccaggtcggagcaacagacacaccagaacccttaatcacaacagaacgcgatgtcatcgtcgctgacttgcgttctttatgtgatattctcgcaaaacgcaagttccgcctcgcctacgagaactggtgctggtcgacccacgcgcccgggtggaaggaagtctgggagatagtgaaagcgatagatcgcccaaattgcgggttatgtttggacacattccagactgcgggcagtgaatggggcgatccgactacagagtctggtctgattgaatcggtcccgcagtccgagctacggaagcggttcgatgcgagtatggatgagctcgcaaggtctgtgcctagcgagaaaatctatctgcttcagatctcggatgcgtataagttgtcaccgccgttggagggaaagattgttggtggcctgagggctaggggtcggtggagtcatgattataggcctatgccatatgacggcgggtatttgcctattgaggatgttgcgagggcggtgctcaaaacgggcttccggggttggttctcggtggagatatttgatagtgggccaaagggaactgggaaggtgtatgatatggggtcctttgcagcgaaggcaatgggtagcgtgcagaagtttttgaagaattgtgcgacggattgagaaaagcaaatttcccacaaaatggtcataatgatatggggttttaagaagtctggttggtacatttggcatattgactatttagacttgaaataaatacacattttgaggactccttggaaggtcgtggacacgattgaaagaaaacgccggggtagaatgcaagattgacgccaatgagatcataaagcatgcaatataccttggaggtcatggataggataccattatccattagttggcattgctggggtacgcaacggtatatgttggaacgtactcctccttaatggaacgcaagctgacgaaacgggacattagattagcacttccggccttatcattggtaccgctagcacgtgcaccaccgaagggctgctggccgacaacggcaccggtgctcttgcagttgatatagaagttgccagcagcgttgcggagagcctcatcggcgacctggatagccgcacgatcctgggcaaagatagagccggtcagagcgtaggtgctagtactatcaatcttgtcacaaatcttggtgaagtcggcttcggtggcgtcgttgtaggagtgaatgacaaggatgggaccgaaaagctcgcgcgaaagcagagggtggtctgggttggaggtgcggtagactgtaggctggatgtaccatcccttggaagagtcgtaggttccaccaacgagcagctcaagttcggggtcattcttggcctcctcaataacaccggacagcttgttgaatgaggcctcatggatgacgggaccgcagaagttggtgaactcagatggctcgccaacgtgaatcttctgcacctcagcgacaacctgctgggcaaagtcctcagcaatcgacgaggcgatgtagacacgggatgtggcgctgcacttctggccctggaactcgaaagcaccgcgcacagtctggaccgcggcgttgcggacatctgcagacttgtgtaccaagtggaagttcttaccaccggtctcacccacaatgcgagggtagctgcggtatttaccatccgccacgccctgtgagatcttaccgtacagcatgcggaagacatcagtgctcccggtaaagtgaagagcggcgaaatcgcggctttcaaggacagtgctagtcacttctgcggcatcaccaggaacgaactggatgacgtccttgggtagaccggcctcaagtagaatctggtgtacgagccagttggaggcaattgcggagggcgagggcttccagatcacgacgttacccatcagagcgggtgcaccagccaagttaccgccgattgctgtgaagttgaagggactgatcgcgtacacgaaaccctcgagaggacggtactcaagacggttccacacaccagcggagttgtgactaggctgttgcgcgtaaagctcttcggcatacttcacaccgaatcggaagaagtcgcagagctcagcggcggaatcaatctctgcttgccatgcattcttgccctgtccgtgcatagtcaaggccataatatcgtagcggtacttggtcgcaataagatcagcggccttgaggaaaatgctagctcgctcggcgaaaggagtttcagcccaggacttgcgagcggcgagagcagaatcaatggcggactgaacatcggccttcgacgcgttggaataagttgccacaggagcatgggttgcggggttagactgagtgaaggtttcatatcccttgagctgtgtgattgaatgttagagatcgatagttcggtagatttaatatgtcttgcgagttcttacctccttgcccgcaactaccagaggcacgttcaaaggggctttctgcttatagtttgccaaagcctcctcgagacccttgcgatctggagtaccaggaatatagtgtttcttaaggttcagaattagcgcaaatgatcaaacaatctcaattccagttccgagctcacattaggttcgttgttaatttggggcaccttgaaagtggcgtacgtgcccatggagcgtgtgctagagctcggaacgcggcatgcgaggcgcgaaatgggcgcgcgggtgcgcaaaatggaagacatcgtgatagtttgaaatgagacaatgagttaacttctttccaagcactattgaaaagggaagatttggagaagaagtagacgcggggaagaactatgatgaaaagggccggctactaccggtcagaagctcatagctaccacggtgggcctccggaggtgtccaggtgggactggctaaagaccatagccaatcatcggtggccggctgctgtcccgggtggatactaccgggccggcgtctatcagcgcggtccaccggttttgtgaaatcaatttgttgaccggccctgtcccccacatttcaagttcttattagtcaagagataataaccttgggaagattgagtcctcgggattccccgcaaacctagataagcttgatagcggcaagataaatatcggataatcaaattcatgggtacagtatacaaagttcacaggaaggtaacgtccgatcattcccttgactgatatactttaaaatctatatctctaccacatggtattatgcacggtaaaagcatcatctttattgtaattgtagatagaagcatcctaaaaataacagcagactaagcaaattctatgcaatccaccaccacactcgctctagccagttgcgtggctgcggctctacctcctcctcttcaagtcggtcgatctcatccttgccagtgaaaatgtcaagttctgataccttggtcatccatggcgtcttgtagtatattttgtggccaaagtacagcacgaagaaaatcgcgaagacaatgtaggaaacaaggaagtccgacgcagtgaaagagcctgggaagaataccgtatagccgttggtaatagccaggagtgaaataaagccaataacatagtaagcgccgtatggctggatgggggtaatgaagggcctggacgggagcagcccgtggaagtccaatgcgctgcgccaacgctaaaataatttgttagcaagttattccatgaaaaagacaggaaaaaaggctatttaacttaccaagtacgccactgccacgatgacccaagagatgaaacctccaattgtcgtgatgttggtaaaccaataaaagacggttgaacccgaagtagataggttcaagaaagacagcagaccgatcatccaagtgactatcacagcattgtacgggacaccattcttgttgcagcgaaggaagattttgggagcctggccctcacccgcgagcgagtaaagtgtgcgagacccagcaaagacccaagaattacccgaggaaaaggcagagataagaacaacagcattgataacgtggttcaatccagtgataccagcattctggatgccaataacgaatggactggcgccagcaccagaactgccgctcgcaacaccctgcaggaggttcttgtcattgtatgcgactatcacaccaatgaccaatgcgcccaagatataaaatgcaaataaacggtagataaaccgctttgccgccttggggatgttgcggcgtggcgaggcagcctcgccggcagcagtggtgatcagttccggggagaaaatgaaagagaatccgcacttgatcatagcggtccagaatgctagaaagcggcctgtgttgatgtttgggactaagtaaggttccacaaatgcgcctggtcgttgccagtaccggaaaccgagacgatcatggtttggaccaccgccgaagaaaagtacaatacccaggatgatcagaccgacgatcgcgatgatcttgagtgatgcgaaccagaattcggcttcgccataccaggccaccgcgacaatgtttagaagtagaatgactagagttcatgcgttagaggatatcaggtataccgcactgttgggcatgtacccaccaacgagaatgatcgcaatccatacaccaacgctgactggggactgccaatattcaatgaccatccctgacgcagtgacctctgatgctatcaacattgaaaatgaatacctacacagggcatttattagtatgacaaactcggaccttgaccgaagggttattaccagtagttgtatcctagtagtatttgaatcagcattgggcttgttaaaaattttcaaagtgtcttcacataccaacagcaaatccaagactaggttccgtaaaccgagtaatcaaatatggcacagaaacaccttgaacgggaagataggtggtcatttctccaagcatgttcatgataaagtatacaatacttgacatgacaatataacccatgagcaacggagctatcacatattagccccatatcaagtttatgtttcacacgctgattcttaccaggaccaactgtcgccagcgctgagccactgccaacaaaaagacccgtgcctatacaaccacctagagccaagaattgaatatggcgcgagctcaagcctcgcttagtatctgagttgtgaatgatctccccctgcatgtcttttgggtcgtcatatggggactcaggacggaccgccgcctcgagactcttaggtgagtctttcatgatgtgcgaaggcggagaaatagaaagattggccaatatacaacactctcgggtgagagaagaagaacagtaacacgacagaaaattctagagagtgcaaaagcctataaaacaacttatatatccgaggacaggcacaaatcttattatatagccccggagaacaaagctaggatagaaaaccttgtctaaaagaaaaaaaaaacaataaaacacccaggggtgaaaataagtttccaccgccaatcggtgattcaaagtccaactagttgtcaacaacgtgagatcgtatgtccaatgtccaaaagagacataaacatccgcgccctcgtggagtctgcgattgagtttttagaaatgattggcgcccacattgccttttagttctagccttatctttgcaggattctcactcatatcacgttactcttatcttgcccttgacacattgcgtttcaaaatatccttctaagtttctaacggtcttctagtattgccgagccaaaaccttctgctaaccaagtagtctgcgattggctgaatgtttattaaacatttgcctcccgtttgcccctggatcacgtggtgtgcgtctggggaagaatccggggtaaaaataggcggacctgtgcccatgtgactctagatacaattagaaatagaccatggagccctggaatgcatctacatgataggtaattatgggttgaagcagcatactaaaacattcttggaaacactaaaccaaaagtaaccggaagcaagatcacgcgcacagaaacaccggcccggtcaccttttgcttatcgcttatcagtgggatacgcaatatcaaaccgggccgagtactattcggcatgttcagttatgcgaaccgactcttggctgcagattgctagggagaagaggcgaatatcaaagcgtcattcaatatccctcgtatacaatgatttttctacccttgacctactctagtagttctccgtagcgttgaaatttcctagaagcctgaaatctggtatagttcaaaggaaacatgaatgatcgcaatgccatccatggatcgtactacatgaaaaatgtcagggcgtcccggccggttaagatgggcctactgaccgtaccggcctggcggttgccaccggctcttacctcttacccaatgagttccaccaacataatctccatatctaaaaggtcgccttcaaccgtagctgttctacttctttagtctttcgttctaagcacttcagagctactttcctctaatagctcacaatactacgtcctcactgctagctatgaaggctgtaccttccgtgcgtgtgcctctcaaggctgccgcccaaacaaccagactagtgagcggcaccagcaactctcgatcctcggtcgcctcagtttcagccaccaacgtatggcaaccacaaacaaaagctccgtctccgctaccacgcaaggcactgacagcgcccctggctaagctgccattgtcatctgtcctacgctcgttgctgattttgtctgtttcctcatcacctctccttctcaagccatgcatctatactctatctttgctggcccatccacgcactgcattttgggatgtctccaaaaacccactgctgaacatgcttgtcaagcaaaccatctataaacaatttaatgctggcgagaacaaaatcgaagtgcaagattcgatcaatcaaatcaaagctctcgggtgccgtggtgtactactgggatatgcccgagaggtccttgtcggagaaaactcggatgccgcgtacgacgtgaaggctgctctggctgagattcagacgtggatggatggcacattgcagacggttgatatggcccaggccggcgactttgtcgctttgaagtatgtgtgataggattcctgttcaatttacaacagccgctaactgaaattcccagattcactggaatgggtaatgacgcgcttcgcctgctgcagtcgcagactatgcccacagaggttatggactcctccatcctcaaggtctgcgatctcgcaatctctcgaggcgttcgcctgctggtcgacgctgaagagcaggccgtgcagcctggcattgaggcctggatcatgaagtatcaaaaatactgcaactcccagacccccggccgtgccatcttctatggaacttaccaagcctacctgcgctctacacctgccactctggcccgtcacctcgagactgctcgtgctgaaggatacacactcggcgtcaagctggttcgcggtgcctacatgaagactgaaccccgccatctcatctgggctgagaaggaggagaccgaccagtgctatgaccaagtcgtcgagtcccttctcactcgcaagtacaattccatgctcaaggctccctcgaaggataccccaaccgaactcccccccttgaatctcatcattgctacccacaaccgtgagtctgttcgcaaggctcatgctctgcgcatgcaacaggctacccgcggcgaggactacggtgttgatcttagctatgctcagctccaaggcatggctgacgaggttagctgtgaattgctcgaaggatttgagagtgccgagaacagtgtcggggctacccccatggatgcccccaacgtcttcaagttgttgacctggggctcggttcaagaatgcatgggtttcttgcttcgtcgcgccgtggagaacaccgaggccgttggccgtactaaggactcccagatcgcaatgatcgccgagttgaagcgtcgcattggcaatgttttcagcaccagcaagtgatattcgagtctttcctgatgtccactttcgaaggatatccagatcgttctgtctttacttcgcagcctacgggttgtttcgctccatttttgcttttgcatttttattcgcgaatagctgggtgcattctgaatggcgttgctactgttttataaggaccttagaagttcactctgatgatgatcaatgaaatcaatgtttcacaatttaaatgactgtattcttggattaatgttagtcaagataggaatcaaattaagaaatcagaccagagagataatctagagataatctaatagttcgaccggcatgattgaggtcgaatcatttggagtgtagtctccaccggaccggcccctcctgaggtcaccacccgatgggctgtcccatctattattctacctctactactcaccccaacgcctctgcttctttcaagtaaaacaaacccgagaaatttgggttttgcgcatttcacaaatatacaatcaaccttggaaacactcaaccaaaatgcatatcctctcggagccagacgtttccaaaatcttccgcggtctaacacaagaccaatgcaacggcttcatctcagcactcggcaatgctctaatcagcataaccaaagaatcaaagccctcaactccagaatccgctaaaaaaatccatcaacccctccgtacagtcttcaccacaagcgatggcaacacctgcatcttcatgccggtatcggacaccgcatccaccggcatcaaagtggtaaccgccagtcccaagggaatccaaggcataatcaacatcttcagcccagaaggccgcctccagggcctcctagccgcagcagaagtaacagccttccgcaccgcgctggcaacaatgaccctgttcgtgcgctgcacgaccatccgcaaggacaacgttcttgttctcggaagcggtcggcaggcggagtggcacgcgcgtcttgcgctgctgctgtacccggaccaggtgcggcgagtgacgtttgtaaatcgcggtgcgacgaggctggcggagatggagagggatgttgtctctgagctgcgccggactaatcccgctgttgtctttatcacgcttgctaaggagggtgtctccgactacgagcaacggctgggggaggaactcgctgctgccgatgttattttcagctgtacccctgctacagtcccgaatttcgggtataaggcgctgcaggccaaccccaagccgcgatttatctctcttattggctcgtacaagcctgatatgcatgagattgataccgagacgctgctttctgggggtggcaaggtttatgttgattctaagacggcttgtcttgaagaggctggggagttaatcactgcgggtcttggggaagagcagttgattgagatgggggatcttttgggggcgggcgggatcgtggaggatgtgattaatattcctgctggttgtaacgttgtctacaaatgtgttggtatgggactgatggatcttgttgttggaaagaaggtgcttgatgttggggctgagatggggcttgggactcatgttgatgggttctaatatcttttggtatctctatatttaagcaagagaaacactatcattgatcagaattatgattgaaaagctttggcctcacattgcattcactcctggacgctattgcatactgcaaggacaattcaccaagctactggtaagggtttgtggtcttaaaacttggtgtattaaggtcatcatacaactagttacaccaggcgaacatcctggacactcaaatcaacgcccatttccttgcaggcatcggacagccgtttgtgagcctcataaatcgcaggacggggaatatccccacttgggatttctcgaagtcgttcttcctctccacctatggcgaacaagtgttgaatgaaagtgccgtagatttcaatagtgacgaggctgggaaacatatgcttgagcctcactaagttcaccagctggttgatgatgttgccattgggagcttcgacgcaccattgcgtcacagagagccgctccagagatggtggtaagtgcttagccagtatcaagtgagagactggacatggtcaattatgttgtggtccaatttgggatatactctataccgttaatttctgagaatgtgtgcattgggagctgcaaatgcttcaatacatgaaacttattgaagcgaatgcatccatcagcactcatgttgtagtcggggggcaagggtgtgtagtcgaggcaaagggtgttgagcgagtgtgccttggaggaaatcaaattcataaatgactcgagacagtaaccggtagccacggggtgtgaaccgctgtcctcagagcagaagtacttgaaggacttcaagtttaggcaactgacaataaattcgcgaattccacaaaccgagtgactctggtgcagctcaacatgcgtgatagttgatggttccagtggtaacaggtgtacacatactccactcagcccatatcccttgatcgtgtgcatcgatgaggtttggaaaaaaggattgagacgagagatatcccatgatttgctccaggtttcaattctcggggtttcgcgtacgatatccgatgggaatttgaaaacgacctctcgcagggactgaaacgccggtgtcggcgttggattgaatgggactaggtgttggtaggctttgcgtagcatacaatcagtgaaactggtgctgcggtcaggccagacgcattcaaggtaggtgatatttggtaagaggcagatgacgagagcctgccaagcgatgggtttgtcgtccgttgggatattatacaaccattgtttcagactggaggttgatgattgaccaaactttttgactgactgcttgaagattccatcgaagctccaggttgtgactagggctgtatggtgttgaccacatgtccacattttgcccagcttgagacttttgacttccccagccatggaggggttgtgaagaagaaagtcaacgagtttttccacccgctgagcgcagcagcaaggatcaagttccatatgaataaatgcctgggggtaaagttctgtgtacatgcgtacattgcacctggcgaggttcagtcgatcttgctgcgctgatagatgatccatgatcacaagcagcacctcagtcgggagggtaaccagcgaagacatcttgaattgcgatgaaaggagagcaagcgagagagaaatagagaaagagatggagagacgaagaaaggtgaagcaggtcagataagcccgagcatcctagagagagaatgaaatgaaggaagaagtaggaggatgactgaaagggaaacacgtccagcaggagtcgggagctgtatggtcagtcgcgacatacgcccattatacctagttcttaccataacattgttccgagcctagatgggccatacttacgtccgacagataggtcagcctataaattcttaaagctggtaattgattcgtatgacatttacatgaaataagccatagatatagaacaaaataaagaaaaataaggcaaaggcataaaaattcccaaaacatcgtccaaagccataaataagagaccgatgagcggaggcaaaatgaattcggggcggggatgtgcctttatcgattagcttccctttctctcctcccatggccgtttttccaaatcctgtatattcctggactgaatctattacacttctctctgcattccaatctatccaccctcttctcttttccctagacgatgccctgatccgctgtcacggtaatggacgactcgaccccgacgcccacccagcaaaaacgtcctcgcgtcgccgaagagaaccgcaaacgagctgtccgagcgtatgctatggccctattgtaccaactcaatcgcgtcgtctaacacaatcggttttgcgcaggtgtgatggttgtcgccgggtgaaagagaaatgtgaaggaggtgtgccgtgccggagatgtctgcgatatcgccgccagtgcaattttactcacattgaccccaatgaaaaaacccggtcaacgtctagttcgtaggttggccgcataatcatatccttattgccatctcgaccgctaatggcgcaatatctgataccagacttttggaccgtgcagccgcccaaagtcgaaatgacatcgccgaggcagaacgggtgcgcctgatggaacgtctcctatcgcattatgtacccaatatcactttcgatattcagtctttgcgacaggctgcagaggatctgaaggagaaacaccgccattctgagtccgatgcgatttctacccgggaagatcccaatgagctggaggatcttgccattgatgaggaggattttaccatcaaggctatgccagataatacaacccgtatgttgggatctgggaccatatacaaggatttgttgattgacactatttctcagaatattccggggaattttcgtacttgaatttcacaatgaagatccggaagaagatcgatgaatggatgaagactgcagcacccgaggtaggtttacgtgaattgtcggtgagcaaatactcatgctaaactcaagcccgtaggcaacttccgaagttgagccttttgaagaacgatggagaagtacacaactccagtccgcgtcacctcaggtgtctgcctcaattacatgtctaccgccgcgctatgtcgccgattttcttgtccagatcttcttcaaatacgcacaaaccaataatttctatattgaagaagactggttagtcgagaaattgggtatctgctacaatgaccccgaaagtttatcatttgacgatgcaggcgccgtgtgctgtattcttatggtcctggctgtgggcacccaattcgcacatatggagtcacctacacccgtgaattgcttgcctccaggctctacggcaaatcaagaccatcacttctcggaagacgaagtcggactcacattctaccaatttgcttcgaggcttctaccagacatcatcgccaccgcttcggttcgaagtgtacaggcctgtcttcttattgggacgtacttgcttccgttggatacttcaggcttatgctatacatactttgggctggcactgaaactggctatacaaaacggaatgcatcggaggtatcacggcgaaggcctttctccacgaatgatcgaagtgcgcaatcgcgttttctggacagcttttactattgaaaagcgtataagcattctccacggcagaccatcatcgttgtcggaccccgacgttgatggtcccctgccggttgattttcctggattgatgccagtcaatcaggtctcaaaccatacaaacatggtaacacttattacattgactctgaaacttggggaggtttcaaatgaaattacctcattgcgaaaataccgcaaagggcaacagcaggactgtcttgaacgattactgagtctccggaaacatctcgttgattggtggtcaactctaccagaggaggttacctgtcgtgatctgaatcctgcagggccgcttttcaggtctaatgtccatctcaagctagactactgtctaactcgagtctttattgggcgccctttcctgttcagcaatatcaaaggcatctcccagaacccctcgcaaggcccgtcgtacaaggggtcttctagtctgtccggtctgtcaaagtatcgtgcgactcttgttacagactgcgtggaagcggctttggaaatcatcgatctgtgccgcttgctccgtgatgagaccggtctcgcgcgagcctcgtttaccgaatttagttcatgccgtgcagctttgctagtcatcttagctcagggcctgaccaaacgaactgaaagacttggggctgctctcgaacagggaatttccctgatcaagatcatgtctatgggtgttggctcagcccgttcggctgtcagtgtcatagaggcgctcgaacgtgccattcgtcgtctcgaagcatggagcgagacccagccggatatgagcagcggaggtaccgtcgagtctgcctatgaccggttcaaaaactgggagatgctttggaaagcagggcctatctcgccgtccacggtcgcatggcaacagcaggaagcttttgctccaagtgagcaaaacatcccacaaaacattcgctcccaagcctctacaatggcgggtcctgctactcttcttcatggcatgtccctgacaccttcgtctgcggccatgattggcatgggtagtgctgccccaacacccgttgcacatgatcagagcattccagaaggagaagactcactcaccgacactttctccctctctcatatgccacactttggcttcgatcacttcgtttccaattttccacaagagctgggcgagttcacagctatcccatgcttcgaaccagattcgcaggctcaatctaatgggttgcctcgtgctgaaatgaaggcgctaggtaacaggtctgacccccctcactggctgaatttcatgagggattcatgatcactttttttcctatcatgctttgttcacaagcagcgactcatctatacaacatgtttaggttgggtcttatgactttgattttataccatcttgcgactgttttcacggctatatattgtgcctgggtgatgcaattccgggaaattgtgcactgcttattctcaatgcaactattcatacattgcaatcaatcttttactttgtctaggtcggatgactttaggcttttgtgcacacagagatatcttaatatctgctcattggcttgtgatgatgcttcgagcattgattgatgaatatacataatgcgcataaccctaatcgaatgtaaccttctttcctgcgaaaacagctggtgcctgctccttggccttccgctttgcctcccaagagggatgcaatgggccctcatccttaggcggacctttaggcttaccactagaatgctgcccagagtgaggaccatcagggccatctctgttctgaggccgtccagaaccaccaccgaaaccaccacgtctggcccctctccctcctctcccacctctcccaccgtcagttgcaccgcgcttcgtatcccatccattatctctgccaccatacttcgcagccagctgctcctgcttgacatggtttgcactgacaccgtacttcttctcccacaaagcccgacgcgcctgctgacccatccggttcttacggacaggcttcgcaccggaattttcctcatcggtggcttcttccgaaccagaccagtaaccgccgttcattaaagatggtaggaatgtcgtggttttcactgctgcagcagagcccttcgttgcctttgctttcttaggtggcggggagtctccggcggagaatgagggtgagggagaacgggagatagaaccggagatatcgtctgcggcggggtcttcctcgtcgccagattccgagtcagcttcggagtctgagccaggtccaagtcgtgagttgaactgtgagaggtcctcgtctccggattcgtctgagccggagatgtccatgtcgtgagccgggcgggagacctgctcgccgcgcctaggttttgtcgtcactgcctctgattcagactcggatccgctttgttcctttcgcggcttctttgccagcacatcctctttgttgtcctcttttttcgccttgctagtcggcagctcgtcgactctcagtagtttccgaatgccggccatgattccaggcatttccttctgcaccggagtggatttgaacagtcgcgccaggatattcgcttcggcggtactctttggtccctcctgggagaccttcttgactgcctggaactccccgaatgtccgcgtctctgcaatccgtttcgtcctgataagttgtttgaacaggtatcgctccgatgtgacatggtaatcgagaccctatgagaacagatattagcaatcaagttcctaagcgagaccctccggagagccgtctgtccagtggaaaaaaaagccactgtaactaggtaccttcaaagtctcgatctcttcctttagtcgcgccaacgccttatcgtccttttgcgccttggctgtcttctctcgccgactgagcttttgtcgctcaaagccgcgcgatgtcttgagaccacgcattatcatcaatacaccattttcgaacatttgcgtcaaccgggttccgtgaatggacattttgcgggtgtcgctcgaccgcgcggggccgctgacttcatcgagcttgcgtttgggcatttctctctgtgctatgattgtatgagtattcggggtagtgaaatgagtgattcaaaaaattaatggctcgttgaacaaaaaaggaaggcagtttcgaggatggtggtgatcgtcggatgttggtgtagcttaatttttttttcttgggcggatcccggcgccaagacagacgcttgcaatgaccaaattgatatctcgttcggggtacttcgtactgtaaattggacaataaaaaaaaataaaaaaaccgaatatttattaccaactaccgagggctaattagcttataaatgagctggggcaacttgaccgctacaatacgttgcttgatatattgcttgggaagaccatcgattaacactgacggatatgtacatacaaacatggcaaagaaaataatacgcgaacagaacctttctatttcttttcttcctccttctcttccggcttgggggtcggaagcttgaactatagttgaataggttaggaccttgtctttcagcaaggaagataatgtgacttacggattcgggagtgcggttttcacccgcacccacgggctcccagctagtagagccgctttcaaagttacggaaggcctgggtgagctcaaggggctcaataacgatgcgcttcttctcttcgtcatagcgcagctcagtataaccggtcaaggggaagtccttgcgcagtgggtggccgtcgaagccgtaatcggtcatgatacggcgcaggtcaggatggccggtgaagaacacaccgaacaggtcgtatacttcacgctcgtaccacaaagcaccctcgaagagaccagtcacactgggcacgggagttgcctcatccgcgtaggtcttgacacggatacgggagttgtgacgaacgctaagcatgttgtagacgacctcaaatcgctgatcgcgggtcgggaagtcgacagccgtgatatcggagatctgggtgaactcggcggcagtgtggttcttgaggaagctaatcacgggaaggataccagcgggagcggtatacactgtgagctcatccttccacactgtgaactgctggacatatttgggcagacaagacatgacgtactgcccataggcgtgaaggctgtcggccatgggctggtacttgtcggtagggttgaccacgggggcgcgcagaggtcccggggctggcaaaacacagttcggttagctcaatttgtcctatctatcggctcgtccattgcacatacgcgggcgctgcgcctggcgcatgttctcaggttccgggcccggtgctgtcgaggccttgggggcccactgaagggaggcggaggaaaaggtgcgggcggccatggacctcgtggcggatgccacagagcgtccagaacccaggcgcatcaaagagcgtgcggaggccattgtgtagagggagcaatggcagatgcaacgtgaggaggggacgaaggcacgtaagtcggattgtgaaggtttagagtggtcgagcactttagtcacgtgttgggcacccgctaaactggatcgggcaatgccagcaaaatgaagccgcgcttcaatttccttccttcttctccatcaatcatctccaccatttcttttcccctctcttcttctcgctcctcctcaaacatctaattaccgttcgcctttctacactttacagggcagcgtatttcttttattttctcagtttttcatccaatttgatcaggtgtcggcgtttgagatctcgtgtccctctccggttatcaccgtattccccgcgatcatgtccagtctttcattgatcgattccgtcatcgacgacgacgatgagttttggtacgtctcgaagctcactcaacccgcgcgatctgtgtactgatcaccccacagccccctgtgcattgaagagttcgatctctccgataagaatttcaaaccgtgtccttgtggatatcaggtatgtccgtctgatcaaggattttcacgcgtctcagcagtacttgctttgttatggcagggacagatggctcgtctttgtttctctctagcagacctgactgacatgtgatttttttttttttagatttgccaattctgctacaacaacattaagacgcagaatgaagaaggccgatgccccaactgtcggcgcggatacgacgaaagtaccatccagtacaagattcccgacgttgaggagtgagttatccgatgctctgtgatatctgagccacatcccaactaacctgctgtgtttaggttcaaggcagatctcgcactgaaacatcgcaaagcagctgctgcgaaaaagaaggaagccgaaaagcgtgaaatcgaagcctccagccggaagaacttggccggtgtccgtgttgtccaaaagaacttggtctacgttatcggcctcaaccctacgatccgagacgaaaatcaactccttcaaacgcttcgtggacgggaatatttcggtcaatatggcgagattgaaaagatcgtggtcagcaaggctaagcccggtggtaaccccaaccagggaattggtgtttatgtgactttctcgcgcaaaattgatgctgcgatgtgcatcaacgccgtggacggttctgggaacggcgatcgggtgctcagggcgcaatacggaacaaccaaatattgctcatccttccttcgcaatgagcaatgcaataatcggaactgcactttcttgcacgagactggggaggacagcgacagctacagccgccaggacctctcatctatgaactccatatccactcaacgcccaaatctcccacctaccccctctcacgtgaggtccgctcaacccatcgcccatcctatgcgccggcaacctagcaaggatgagtcgatcagtagtcgcaccggcataccagatggcccggctctcccgtcaactgcaagttgggctaacaaagatgctgctattcaccgaaccagaaggactagtctcacgggtagccaagcctccaacaatagcccacggcccgcaagtgccaatgttgcgacactagtcgaagaaccgaaacgaccagagaagccatcgccgatttctcaagaagccccacaatcaatttctcaagtcgatccccgatctcccgccgcgccaccacgtccccgtcgggggactcaacctcccaagctgccatcaccgtttgacggcttgctcaaggatatgaactcggcggatttcaagttttccttcagcacggctgaactgagtgccgaagaggtcaagttgattaaggattacccatctttcatcgatccatatggcggggtcaagcgcagagcaatgcgagagaaagtcgaacaagagcgtcttagccgcgagcacgagttgcttcaatccgttgcagctgaagaggataaccgtgaagctggtagcctccagctaggtggtgagccagaagaaatcaatcccccgcgcagtcgccagacgcgcgagtctcatggggctatccagccgccctcgcagcaggacacggcggataactcaactgttggatccccagtttctgcgactagccatcaattccaaggcctgaacctcgctggacgaagcttaactcccttgcagcaacagcagttgatgttactcaagtccgccggtaatcaacaagctggcctggctgaccctctcggctctgccgctctggaccaagccgcccatgtccgccaaggccttgtccacaatcagatggcacagttcaatgcgctgcaggcagcacagaaccgacagtcttcccgattttccttcgccaatgaggccggttctaagaatattcctaacgcgcgcatgttgggccagatgcaatcttcttctcccaaccctctttctgctcctagccctcaacatagtcttgcagcaagtggcttctatgctagcggagtgcagggtcccccaccgggactgaagacggctggtacccctccgattagtggtggtggaatgttcgcccaaggacatggcttcacctctgggcttggtggtaatggaggaaagcaagatccaactccggagttaatgcgagagctactgcgtggacgaaatggtacgaatgttagtggtttacagggccaggaggcggctaagcgtgagttcatgttcccttttcttcaacagcacaataccccaccccctatgactcctgtcaatggccttctcagctccttctatgggcaccaagcgggcgtgatgcctgattccggtggcccacagaagcagaagaagaaggggaagaagcacagacacgctaacacttcctccggtggaggtggtgtagtagatcttgcggacccgagcattttgcaggcgaggatgcatcaagtcggcgcgaatgctactgctgggcaagcgttgtacgggagtcagggccaaggtgggtacaacccctccatggtgtacggtggtggcatcagtcggtggtgaatccccgcggtttcacttgttcccgtgactggcttcctgcattttcctgttcgctttttcgctatgacattctgcccttgatgggcctgctttatcctgatgacatgatatcaattccctttctttcctccccgtggaggaggtcttgcatttgttgtttctgttttattcgcggtcaggctggcagctctgatttatgcgatgggctggacggtcacctggcgtactagggctttcccttgtctccttcaattgctatctatttcttgcatgctttctctggctctttccaggtgtctttgcatttcatggacatactggcgtgtgttccgagctcctgtattcggcggctgtgtattccctttctacttttttgcatccggacttccattatacgatctgctgccctgctgcgtcttgaagaccgcaggtggtgtttattatggattagtgtacgttaagatctccctaccctgataccacaagccgaaaagggtcttattcgaaatcagtctcctcacagccgccgtttacatagacgctatgtcctgcaatgttcctggtccaggagatgcccatcatgtaattacctcgtgatcgtttttgtatcttcgcttaaatccgctgctgctgcttagtcgcccttactaaagggatttatttctatccctctcatctgcccagtcacattgccacattttactttcttggacattcgctaacccaatgctctagtgaatgaggacttccctcctcttggagatcaatccaaggatcgacgacctgttgacagctttgggtttttgaagtctcagttacctggcgagtcggccgctcgtgttgggactcctacactcccacctggactgcctttacctcacgctcatccctcgtcttctgtattccaggaccacagttcctctaaaccttcgtctcctgccccaatgctcccacctggcttgacgcccaacatttcgcgactcaacagcccatcgcagagtcgtatggacagtccctctcgtcttttgagtcctgaactcacagtgggtggacctttgacatcaagccgcgtgaaggacgcttctcaaatatctttcggatcacctgtacaaaagtccgccactaaggctcgtaaccaacgcaaaagccagttcaatattggatctgatttcaaagattcgcctgcaaagattgcataccagttgcaggagagttctgccactacgaaaggcaccccgctcgactttggcgccccactacccacgtccatcaagactgagcaggcacgacctcctagctctgtttccgtcatcgggtcgcggcccgacacgccgcaaaccatcgcatctcgcctatctgactcccctgcccctcgtcagcctcgtattctgcgtgtggtagaaaccccgaagacagaaactcctcctattctcaccgcaccatctgtgtccgcttctgttgttggtggaaccaggtcccgctctaggagacagagcatctcgtcaaccagcatccccggaactcctgctgatatgggttgggacgctgattactatccttccacttctgcttctcgtgcgaattctcctcctgcctcttctcgtatcggctccgctcccgttcgcgccatgaccaagagccaggttaagaaggaacggaaacaaaaggcaaaagaggctgaggctaagaaggtagaaaccgcgcttgtgaatgaggagcctgttcaagcacctatcatggggcgaaagcgcaagaccaagaaagcccccacggccgccccccccccccccccccccgccccccccccccccgcccccgggcnnnnnnnnnnnnnnnnnnnnnnnnnnnnnnnnnnnnnnnnnnnnnnnnnnnnnnnnnnnnnnnnnnnnnnnnnnnnnnnnnnnnnnnnnnnnnnnnnnnnnnnnnnnnnnnnnnnnnnnnnnnnnnnnnnnnnnnnnnnnnnnnnnnnnnnnnnnnnnnnnnnnnnnnnnnnnnnncccccggcccgccactgtcagcacagctgatgcacccgctgccagtggcccggaaaagtcgagctctctaaaaccagtgaacgttccttcagtcaaggctgaacccaaggtggatacagcaaagaaagtgaaagccaaagagaccaagcccgtcagagagcctaccccaccccctgtcgaagagcttcctgttcagaaggaagcccccgtagagccatggcgttcaaacaatacagttggacggttggtcaaggactccgaggcccttggaagggcaatcaaggatcttttcatggaacgaacgaagcctcttcacgagttgctcgctgagatgcataagtccggcgaacttgatctcaataagagctccctcttcaaccctagcaacctcagccagcgcaccgacatgaagtgcactgcggaggactacgattatctccagtgtcccaacgaattgactgaggaggatcggaaaactctacttcgtggagagcccgttcgaattggcgatgatttcctcaaaactcgatgccttatcacaccccgcggctgcgtcctacgccacctcgaaccagaagaggaggaacgatacctagagcttgagaagaacatgactggtgtctcagatgctttcatgattggggacgacgcaagcaatcccagcgggggcctggaagcactcttcgcgaacccggagaagttcaacatctgctgggtcgacgacatgcccactcgcctaggtgccacgtccccgtcatcttctcttgaggcggcggaatccgtgattccgcctaatgtcctctcggccatggaagcagacagcacccgcaaccatgactgggctgtcgccaactcggcagaatttctcaacaccacccctgctgccgtgcgctccttcgccgcagtcaccgcgcagcacatgctgggtaatccgggcatggttggcaccaaccccactctcgacgacgttgctggtttgaccaacgaggaactgaaggagctctctggtcgttctcaaaaggacctcgagctcacccggaaagaaatggattcgctcgacaagaagttcgcagctctgcttcgacgcaacaagaagcttcagcagcaggcattgaatcttgctgctgggccggaagtgtaatcatccgcactatcctggaccggagctctcagttccctttgcaatcgcagcttcctgggtggacttaaatctccttgcatgtacatctatctaagcctgaatgaatcattgtagaatacttgttacatctgtcgacgtgcgttctagtaatctaatttccaacccttccatgaaatatgcaccttctaggcctatcctcacctggctcgcaatgagacaacttgattctttaacgccaagtgaatatcggcacatatccgaagttgactcttaccagttttgtgtctgatatatataccctacctgcctgccatcatgatttcaaccaacaaattaaagacgaaacctaccccgtccactaagttatagtagttaaagtgagaaaacatatcgaattccaattatcatcggctaacatggctcagaacatcaatgtctacaggtcaataggggaatgcgtcaagggatcaatcaccgactccgccagggctggatctgtcaacctccacattcctctactccgtacattttaatcaagactagacatttaatgaaggctcgttcctccgaagggatccaacattagctgattcttggcatcacacgctccttgacgattcaggttcaaggtggttgtctagtcctgaaacatgtggctgatttccgttattcctaaatatgtcaagtctctcacttctttcggtctggtacaatagggattgaggctgatacttgacgcttctgtcgctatccgatccctttcttccccatgggagattattttctcgactttctcggctggcatgtataatgcgtaactcactgagtatactatttcccgccttgttagtctttatttcttcactgcgctcatttctacatcattggccctctctggtgctatattcatccgtttgtttgttcacgttcaaacactacgatgtttcaattactttctgtgatagctactctgtttacactagcctcaactgccatatcgaccggcctactagtaccactatacgcctggcccggaacagacaaatggaatacactctacgactcaattgcagcccatccatcaatcccattctacttgatcatcaacccgtccacgggtcctggtgacacagaatacccagaagacgtcttcataaccgccatcgccaagctaaacagctatcccaacacgaaaatactaggatacacctacacaaaccaaggaacgcgagacagctccgaagtcgaaaaggacatcgctatctacgctaaatgggccagctatgcagggcagaatatcactctctccgggaccttcttcgacgaggcagcgaacggcgaagatccgagcaagctcgcctatttcgagaacctctctcggaaatctaagagcggtaacttgaccaccgttatcttcaaccctggtgtcaagctcgtggcagatgttgccaagtggttcgcggcagcggacttcattgtggagtatgagaatacttatgctagttgggtggcttcggctcctgatgatcgcttctcgacgcctgataactatggaagggatgctgttatcttgaatcagacgcccgaagatgccaatattgataatgttgttcggttggcgaaggatatgggcctcggtgctatatatctggcttcggatgataattatatgaatctcaccactgtgactaaggttgcaggtgctgtcgcacaaaatcagattgttaggcgcagggggtaccgtcggtttcagagctgagtatataagatcatttttatgtcagagtgcatgtggtcgagtgctattttgggttgtttatatagaaaccacggaagattccataaaccaatgcaaccgggatacatcactttctgggaatcttcgaaatctatatggatatggctctcgtgttagaacgctctaacgccctgaggtttacatgtatattttgtagaagcaagtcatctcaatccagaccgttaatcccatctttatacggccgcaggtcatactcatcaggatatgtttccaagatgcgcttgagctccgtcatctgctccctctgctcttccgtaatctcctcataaacatcagcaaatgcctccctaagcgagggcttcttctcctgctccgccgcgccaaactccctaagtaccgccttgcgcatctgatctcgcgcctccttctcctgctcctcactccaaagcccctgattctcaagccacttccgtagccgaatgataggattatcacgacgtttccaatcctcaacctcgacgcgggcgcggtacgcaaagctgtcatcgctggtactatggtgcgagacacggtagctcatggcttcaattagcacaggccgtccgccctcgcttagggcaagtcggcgcgcttctttcatcgcttcgtttactgcgaagacgtcgtttccgtctacgcgaatcgtgtcgatgccgtaccccacgccgcggctggcgattccatcgccccggtattgctctagcgttggcgttgagattgcgtaaccgttgtttcggcatataaagacaaccgggcaagaccgtgtagcggcgatgtttagcgcggcgtggaagtctccttcgctggcggctccttcgccgaaatagcaggccacgatgcgtgggtcccggtttgggttctggaggtcttggagtttcagcgcataggctgcaccggcagcttggggaatttgtgtggctaatggggatgagattgtgtgctgttgggtataatgttaagaaaagtagattgatgtaaagaggtggtggtactcacaatgcggggatagttttgtccatagtgaactggcatattccgaccacggcctgtatcattgctattggcaaagagctggctcatgaagttctttagggtgaatccacgttgttggaatacaccggcttcgcgatattgtgcaaagaccacatcgtctggtgtcaacgccgcggcggatccaactgtgatcccttcttcgccggcggaaacctgcaggtagacggtcagatgagttattttctttatttaaatcttaagtaattgaacgtaccatgtagaaacttaagcggccctgccgttgtgcctcgaacatgaccacatccataatgcttactgcacgctaaaagttaggtacttgatagcgcatcaagcgtggggtaaccaaccagatagcatatttttgtaccatatcaagacctcctcattcgtaacatcaggtgccggtctcttcttatcaacctggcgaccgtctgagtccatcactcggtaggtagggatagcgggcagatccgaggctttgaggaaggccatctccgaggtgaacttgctgttcacggccccagggaatcgaacactaaacaaatcaacatctcgtcagcgtttctccaaaaaaagaaaaacgttgtcctcggagcgatcacctgtctgaccccggcggctgcgagatggagctactccacctccgtgcggggacgatgcgcgctgtagttatgggctggctgcggaggccaccccgggtcaggagctttagagacattttgctctctgatgctattaacattttagattcaatttgtttcaatggtaaaaagtgagagatcccaaggtctttgaatgttaaatctgggggatgcggagagcggttggcgtcggcatcttagcgtcactccgcggccaaccgagtatccggttgatgcggggaagataattctacaaccacattgagagtgaacaaaacatcattggaagatctcaattgattgtgtcctttgtattcttatttcttccctagcataaggcctcaaatctcacatctcacatggctccccagcggtggggctcaaatccctcgcgtatcatatcctacattgcgacagggatgagagagagtcaattcgttcctcctctacctattgatggtcgaataattcagagcggtggattgcgacgatgttggcagatgtatcatagatcacaaagttgagttacgtgactacctgttcttcagatccctacgtcaattattctacttcccggatgtcgtagtagccctggagtccaagacccatcttgtcgaggactatacgcttcagggcatcggtgatagtcgtatccctttctagaactgggcctgttggaagattccactatccatatgtggccgtgccggtggcacgcttcagatgtaggacggtaaattgcccgttctcttgtaccggaagtctgctacaccgacgcgccattgtttattttatccaggggtaagtctgagattctggcgccgatgcttgtattccatggttagatggacaagttggtatgagaggatagagacggcgctgattggaggaaagttgaagttacaccaagggcaataaatactgtttgctattttgtttgctattttgttctctgtttaccacaaaagttgtctccttcattgtctaagacttagatgagtataaagccaagcacagccgagtgtataaaatgagtcaaaactaccaagaagggggtaaattgaacatatctaaagacattcaaaaagatatctaactttttttggaaaaagcccattgaaaatatttcatgtaactattctctataaagtccacgggtgttcctaatgaggtcggatatgatgacatcggtgcctgtgtaccagcctttgaggcttcggctccactatcggatggagacgatgacatagttggaatcgctttcctaagaatcttcaactttgctttctgtcttcaattctttgtacaatcatgtccaaaaccgatcaattccgcgaggtattgaataccgacatcaggactcctattcccgaggagctcgtaaccaggatctcatccctgccgccatttatccctataccgggtgtctccaactttcgcgatctgagccatgataacaacaaagtacgtccgggattcgtgtatcgttcgggaaacctgtcaaacatcttcggttctgggaaatccatcatcgcaaccgaattgggaatcaccacaattttcgacctccggaatgaaggcgagcggcaaagagccccttcaccctctatcccaggagtcgagacgatatggctaccatacggagatcgaccggccactttgaatctccgcgattttgcgggcgaagacaagggcgcccaagggttcgtgaagatgtacttcgggatcctcgaagcggctgtcccatgtctcaccgagatattcaagcatatcagagataacccagacgacccgttcatcgtccattgctcaggtacgtgccacgtgtatcaccttgctctcatggctattttcgtatagttgcgtgcaaaatcccattcataatcgacaaatgctaaccataggtttccgtctatagccggtaaggaccgaacgggtgttttcgcctctcttgtcctcctcctaatcaatcgaccccatgaggatattatcaacgattatatcctcactcgagttgtaatggaaggcgccagggataacctcatggaggcattcgcggtaaacacagaaaccggtgaagccgacttcagccaattgagccccgaggcactgggtatgcttgaaatgtgtggtgctcgagccagctctatggaggctttcctggtatcatttgagaattcctataaaaatggtgtcgagggctatctcatggataaacttgggttctcacagagtgatctatcgacaatgcgtaagaacctgacctagcggatcaaccgcgagcatctgtaaatatataaacaagcatgtacagagtatttatatattactgcattggctatatttgaaattagaccaactccaaggtgctagctctgatttcatattcttcgtgtcaatatttcagcgccgagagctaatcgatcttctcctagatgggaagttgtcgagggctgtatcgacggcgccaacttgcaaatacggaattggtacatgcgcggcggataggaggctgcgcgaaggtcccgtctcaggagactcattccgcgtcttccgaatactagttatattgtagacagagcaatatgggatacaaagcatgaattaaattgagttgttgactgagagagggtagaaaagatcgtatccgccttaggcaggaaggtggctcaggatgatacgttaggatggtacttttgtgtaggtcacctgctcatttccagtccgatatcctgccataatcagtattcttctgtcagcttcttccctcctacttgtagtgttaactatggttgactttccttatccatacgacactgactaattcatatcaatatttgcgtgcattatgtctgtctctctaacttatactaccaagtttatcggcatctactagcattgtagatagccgtggcatcagtgaggaacttgtcaaacgccccgtcaccggtagccgggacgatcgacttaggaaggtcctcaccgtcggcattacggtcatcgacagtcttagccttcgtcttctcaacccacttcttggcagacttgaactcggcatctgctgtacaatgatcattgtcatcgatcgcctcgagcatagcaatcaagtgcttgcaagcagttgcccactgcttagcgacagtcgtccagggtgccacgtccgtggcaaaggccttcgtggccattttggggagaacatcggggatgctgatgatgagtgcgaggcgatctttcaacgcctcggttccgtcactggaaccggttctgcgaccggcccagaaagctgtaatgtccttggtaagcttgggcgcattgacctcaggactttgatatggccagttctggttgaggtctgtgaatgtgataagtgagttgtgaacggttgtgtcactccctgaaagctcccataggcttgcattcatagacttggtggcgttgtacgatggcgcgttccacgtatagtctccatagttggcgagtgcgatcatagaggcgtatggttggttcatcgggttcgaggtgaagccaaccagacgcttgtataattcggcggcacgctttgtgagcgggttgaggaataggcggtcacggttgttgtcgttgactgggaagttgtcccataggaaaaggttgtcggtgacgtagctcgagtgggctctcacgatactttcgactgtgatattgtcgctgaatattccttcgccagtccactgaacgcggatcttcttgttcagcttggtgccgaattctttcttgtaaggggtaggtgcactgccggcgtagtcggtcgggacggtctcgaggtcttcaagatcgtttggctcaatgtattgcgtctgtacacggttcagatagaatgcctgggcgtcggcaacccattcatcattctcggtttccggccacttcttcttgtccgcatcgcaatggaactcaagggcgatatcatcgagagggatgtagaagctgctgataccaaagtcacgcagctggttaaacttggtgacagtagcgttgaagtcctcgtcagatgagtaacatacgtctaggccgggcgatagagcataggtgaagtcgacatgattgatatttgcagtctggacaagttccttgagctgggtaagctcgtcgccgctgtaaagagtacgccatttggcgcggagaagtggatcatacttgggcgtgtagacataggtgttcattttatgctttccgtggaattcaaactggtcgagacgcgcctcatgggaccaggggacaccgtagaaaccctcgatcgagccacggatagacatgagcggccagtcgcgcaccttgacaccgggaatatggtcatcggcgagaagttgacgaagagtctgtgccgcatagaatgtgccgcgggtgtctacaccgtttattacaatgcttggctgttgctcatacttgccagatgcaagaacatagccgtcagcgtcgaggccattcgcggaatttccagcaagagccttggcagcagcgacagcgactccggcttccgcctctgtgccaacaaaaatctgtgtacccttactgctgggcttggaggcaagaacagcatcaccaccggcagcagccacaactcccttgaccgtagagatcgtagcggagtccttgaaattgtccgtcacgattgtgacattacccgtgagcgatacctttccgcccgtgaacgtgatttcttgcggagtgggccaaaccgcggggcctccatcatcatgtataacaaggtcgctgtggtcaattgatgcagcattgacaggcccaagcgcaaaagccagaagaaaagcccgaaggcaggtaatgcgatgtgaactgaacattgtgtggagaagtatcatgctcaagggcgtggtttataccaagaaaggtgatcacgacgtgtttattgatgacttgcaagattggaagttacgatgccacgatcgattacatcatggcgaggagagtgcagtatcggggtttgatttgatttgattatttatcaggtcgtatgcagccccgatgcatactaagcagcaatttagcagagggtatttcgggtatgccagaagataaaatatagggaatagtgtttcaggtgataatgttcgcaaggggcagtgctctacgatataagacagagagcgaacctgcgacgattcacaattcacctcctcccgctcgtaacctcggaacgtagcgcgtctatcgtaatattatagcgagataacctggcgtcgccgatcgttgattgggtggacacaagtacaaccttgtagatcgtcagatatcgataccccaagccacaattgttaaagaataatttagatatctcgccgaaatacgcttaagcccttaaaagcctaaagtctccatgggctataaccttaaaattgcgtggtaaacgagataaagtatgtgaattgaatatattccggtagagctgctagaattaggacttggtatgacagatggggatttcttgatgagaataatgggcattaacgacgtgagacttcaatgatctgatctatccagctcaaggcaatagctgtttggatattattccgctataccactgtttcgattcagtgatatatagtacgttttcctggtcgaggttgatatatgcaaagcgctgttattaatgaaggttactgcctcttccaacgaactagttatacttcggaagcataattttcttccaagaccatctggacctatccacctgcatcaagactaacctgctctgagccaaagggaaaccttccctttcagcctagatccgaataggtaaatgatatactatccccacatcactacggggtaagaacaagaaactagtaccggtgaaaacccactggagccatagactatcctatagacccggtcgaagctcggaccgaatgactgccgatgtaaatagacagctctggatttctcggcaagtgccattcgtactgctaaaatggctgaatggatatttactgcgttaaattcaaccctaaaaatgaaagctgggtcgtcaagctagtgatgctagtgtagtggatcgctttcatactagggacgaaccaaaacatacatcaacatcaatcctatcgtttggatctatgtttgttctgagatattcactgacgtgaaaaaataacaagggacatcattgcattcgtcaatatatgagtatgttatcattgtaagattgcgccaaaaaaaaccctaactggcatgtaaatgcatcccaaaaccattatgcagagagcttgattgagaataaagtttgtgccccttctttaccacttgttgtcaaaagctttgccgtcaatgtagttaatcagctcctttactgggggcagatgatcgcgaccagcgccaaacaacatgccctgacgcaaaactttgcggtagttcttgcccggagacaccttaccgagaacatattcttggcgagtctcgactcgagtggggacagggatagaacggccgacgacagcctccattccctgccaagcaaacgtaatggcctccttcgcgccaccagggataccagcctcgtcaagcatcataatgcgtgtgttggggtaattctcctggataaaggcggcgatgttggggttataggctccaccaccgcacatgaatatttcggcgatctcaaggcccttgggagcatagcgacggtaatggtccacgatggcctgggcggtaacacgggttatggtggcgacgacatcgtcaggcttgagccctttggcctcagccttagcgatgaattcataggcaagagtgtcacggaagacttctcgaccggttgtcttggggggttccaacgcaaagtagggatgtgtcaggaagtcatccacaagtccctggtcgacggcaccgcgggctcccatctcgccgtcctgatcgtattcgcgctcgccgttagtatagtggcgaactacggcatcgatgaacacgtttcctggaccggtgtcgaagtcgtagcaggcatcgacaccgccgtggctgtccgggagcacaaagcagacatttgcgatgccgccgatattctggcatgcacgcagctttgtcgggtggtgtagcaccagcgcgtcgaaaaaggcaatgaggggtgctccctgacgtccagctgcctgatcactcactcggaaatcggtgaccgaggtgatgcccgtgcgcgaggctaggaatgtgccttcagccatagtcaaagcgctgcgggtctcaccggcttctggcatggagagtagccagatggtttggccatgagatccgaggacgtcaattgatttgatgtccacattgtaatccttacagaactggtgcacggccgaggcaaaggtctcgcccagaatcacattgacctctgacagctcggaaggggatgtcttattatgcaggatcatgttcatcacccgcttcttgatcaccggctcaagtggaatttcaccatactgcgtcattggtcagcatgtcgtaccctgtgcagcattcacgtaggcagtggtacttgccttgagtagttcgaagtgcataggcgattccggggtctcctggcagaatcggcaaagggcgcaatcaatgccatcctagagctgatgagcgtggtgtttctcgagtgaacagacggccacccaccatcgaggttccgctattcagccccagaactgtgatgtctaaactatggctggaagtgccattgacagagttgatcaccatgttggattccaatttgcgaattcaaacgatcggaatttttttttaaaagaaacatcgtgaggatcaagacactatttaagacccggtccctaaccggaacccataatgaaccaaccggtagatggtggagacagaatattcgcgtcggcattctcaatctctctgatagatctaatattggttagcaacaagggcagaagggatgaccggcaaaacgcctattaggaaagaaaatgataaatggctacacgcttgtgggcttggcccccgcatgaacagctccatcgcgccccccggtcttaccaagcttggccttcagattcttcaccaaatgccgggggcgggtccaattgcaaggattactcgagatcgcgtattttttgcttttggcgatctggggaagtggcttaccatataacatggggtataccacactctggaagcgactttcgccacgtcagctgaatgtcgccatccagatattctccctgatctcaatcttcttcgagggttatgaccagggtgtgatgggtggtgttaacagctccccgagatatgtaacagaagttggcatcggtagacctgatgggactgtgaccaacaccactcaccaggggggcattgtcagcgtctattacctgggtgcgatcttcggttgcttcgctggcgggtggcttgcagatcgtgttggtcggatcaacggcctactcgctgggtcattatttgcgctgatcggtggcgcgctgcaggcgggcgctcagaattccaacttcatgctgtgtgctagggtggttacagggattgggaccgggggtgagaatggatccctgctagtcttgcctcggggctggaaggagctacgattttaatttgtcatttcacagccttgactgggattaccccggtgttggtgtctgagacctcttctgcgaaccaccgcggcggctttctgggctatgtgttcattgccaattgtgagtcgttgattcgcgatatccactgtgggggccattgctgacatgcatgaacttcaagatctaggtatatccatggcatattggatctccttcggcctcgctttcgtcgataacggttactcggacgtacgatggcgcttcctcctcgcctttcagtgtttcccggcactcatactagtttcctttatcaaaatgttaccggatagccctcgctatctggcctcggtggggcggaatgatgaggctcgagacctcttgaatcgtattcgcaaagatcgggcatcgcaggaagatatcgaccgagaataccttgagattatagtgaccgcacagggaagcaagcgcagctcgcccactgaatttggaatgatcctaattggaaaaagtgaaaaaccagggctaaatcttggtcgacgagcttggttgtgtgtttggcttcagattatggcgtcctggacgggtattacggtgagctacggcgctcacaatcggtcccttggacaattattggggtactaatagtaattgtaggctgtgactgcctattccccgacactgcttgctcaagcaggctatagtgatataaagcaaaacggtcttgctggaggaatcaacacaattggaattataggtaccattatcagtgctcaaataatcgatcgattaggccgacgggtgtgtctgatgggcggagcagctattttatctgcagtcaacttaattgtgattatttcttctgccgctcgaagtgctttctcctgacaattttataggctggagctgtttatgaaggttccctgcataatcctgaaaaagcatctcaatttgcgcctggtgctgtgaccatgctctttttgttcaatttggggtaagtctgaaatgcgacacttcttgtcatatgtactaaagtgtaaccagttatgctgctacctggggtacggtcgctttcttgattcccactgagatattccccagtgatctacgcgcccaaggcaatggctttggtattacagggtgggcaattggggttggtatgaccactttagtcaacccgatcatgtttaatgtcatgactgtaagcttccccgacttcacacttgaattgaaatactgacgaccgcttagagccgtacatactttttgtttgctggccttaacctcatctggatcccgatcgtctacctatgtaggtttttgatctcgtattcatccacttttagttctgagatctaacatgattttcttcgcagtctaccctgaaactcgcgaccgctctctcgagtccatcgacgctcttttttcgacgtccagtccattctactggaagatggaacaagcctataaactccatggcgatgtcctcgccgaacacggagtaaatatgagtgaggtctctcagtggcggcaagacacaaactgaacttgcgactgtcaatttacgttataccatatagagccttgatcgtgtcacctacgcttgcacatgtataacatcatgtacccgatgttgttaccccgcacttaatgtattatatagaggttgtattcacacctttctatttgtttttcatttctttctcacttattactggtaggtcatgacttttatataaaccacatttagtcgaaatctatatatacatgccgtcttggtaaacagtatatacatgatattctccaatttctatgatctgcagcattataaattagtataattacatcttctcgcgatgattgccgaaacatccaccgcattcgatcccggcatcaacctgaaatgacacgctgctgagtcagcttttgtggcttgtaactccaatgccgactttgatcctcttcatttctaggattcaattgcgcatctatgtcatcggagaaatttactgcttcagcttgatcgcaatttttttttgcctttttcccattctgcacaggcctaccccacgatttagtacacgcgacccgtgtctctgtgcagaccccgaaacccgtttctcgaccgaagctcccgaggtcggggcccacgaattgtcacccgcttccttgcgcctgagcccaattcccgaggttggaatgaactaatgaattgaatgtcgcaaaaaccccgaaagcttcaacgcgtctccaaagcctgtaagatccccacgttgaattgtatactttcctcgcgcttggcggcaatatccccccccgaactgtactagaaagcttggagctcatgttgcatccataggcgacttctgcaacagacgcagcattaaatgcggcaggagtgcagacccgctaggcagatgtcagaattgtgcggattttgacgtcccgtgcacctttgatcgccccgcgaagcgccggggcgtcaaggctggcaccagggcttctatgcgagagactccgttggtagaaacgcctgcccccgagaatgtcctccctgtaccgcctacagggcggatgtcaaactcctctgtgtctaggagctacagcgagtccgcccaccgcccgtcattgactggggacccatggtctaccttcaatgttggtggcgtggcaacggaagtgtatgatgatgatagcgcattgcgaaactcatggaatgcatttgccattgccagtgatcgtcaaatccgaaatctcgtgcaggtatacttcgagattgtgtatccaatgtacgaatcgaccttactgccctttcccttttctatggctgataaattcgcagattcccgcttttccacaagcaatcttttattgaaagagttaataaccaagagcacctccgaaatccggggttgtttgcctctacaatggctgtctgtgcgttagtttcgggacgcgcccgagacggcgcattgttcactaatagatggcatcgcgaagaacttgccgaacctccatctgaggcattttatgctgcagcgaaagattctattccccgagaccttgcagcggcaagaggcattaactatatgcgtgcatgcgccattctcgcaattgccagcattcaaaatggccagatcaagaatatgcaaaagttttccggcatgtaccatacacttaccagtatggagggccttcatgatgagaagctttggccgaaaaacttgagtcctatcgaaatcgaggagcggcgaagactagtatgcattcctttatcttatggttacggttcccgctaacttaatgctatgaagttctggtctatctacacgttggatatttattctaccatcgtatggggaggcgtgattcgatatcgcgaagcgcattctctggtaagatatccgagtgaggttgacgatgagcttatcacactacacggctacgggatgcctcccgtgtctccggactcgggcgatgtgaccgttgtatcacggcagcctgtagcatggcttcggggctggaactttacgacagacctatatcgaattctagaatacgtcgtcgacggcaatcggcgtcgtttctcgtcagccaacagaacctcacaggtgtggtctctgttcactccggcatccatgtcagaaccagcagtcatggagagggtactatccatgtacgccgcactaccgtcgcaatttaaagaaacaccacccactacaggcgacatggccaaggacctgttcgggttccaatctgccaacatccaggcaacactgcagctcctccggatggtgcttttgtcagcggaagagcttggcgtagaccgcaaatgtgacgtggccggggaacttctcagtgtcttcagcaacgttcccgtggagtatttgaaagccatcagctcccctttagtatgttcatcattgcttttccagcccccatttgactaaccgctcccagctccatcatcttggcggaatcggctatatcctcggttctgtaatggaaggaagtttatcagaagcatcctatcaacgcgtccgcacgttgttgtaagtttttttacacatcccaggccaattgcccaaattaataagctcttacagactcgaaatggctgacctcctcggtcgcctcgagacaggtctccagcgtgccgccggcgccagccaacgccttcgatcgcaagtagacagaatcgacggctacatgcgcacctcccggctagtcaatctcacattgcaacacccacaccctcaacataacgcaatcccgatcgataataaacgcgagatgcctttcccacccacaacgtacattcctcccagtggcccagtcccggcagtcggcccaccgacgggaataggtgggcagatgatgcagttccagctaccgccggagttgttgtcggattggccgtggccaatggatggggctcattcggatgggttccttccgctggcgtttgaataatttattcggttgttgctgggtgcatttgtgcgagttggaggccacatgtttgatgattgcatagaatagaaggagtgtaattaatcgtctgttttatatttatactagcggtaatcgagcagaactcacgaattgtggtgttcgttaccctttcgtcctatacttgctttaatcgtccattttgtctctttcatatgttcgttctcaggttcaattatcgatctaaggtgcttctgcgccctttgaggtattaactacacaggtccgactttcggacgattacatgactcttggcctcttaagacacatatagtagtactaagcaatcttttaacagataaacctcattatcaaaagtctatttagattgagtggagggcgtccattttgtggagaatgctaattgagaaagtttgatgtacacagtttctcttacataccacagcaatcttgactcgaagtatatacggagtacgtaattccattatgagaaatatataaaaaagtactgccgatcactggccttgacctgtaggaacaccagcatcatgtacaacatagtggtcaagcccccgctagctcaaaatgcgggggtatacttatggcttcggccctcccaaggtaagcgggaatatcataattcgtacttggccaaaggtcagtggaaccgacagagagtttgttgatcttggccatggcccgatcggacattttgaactctttcagcctagtctccagtagtccaccccacaaaggcgtgttgaggcattcatattaacttctcttatcaaaaagtcttagttggtcattgagctatggcctctggacaattcccatcgaataacctgataagcttatcacttggcagatcttcaaggtttagcatcgccttctcctcccccttttgggataaccccgaagacattcgctgatttgaagttgatatcttgatacatctcttatcagcggtgtctggagtcggcccacggtcttggcccacgttcttggcggtgttagagatgatcaacatcgatgccgtctatctatcaacgtcgttggtgccaatcctgaccccaaggtcagtgcgcatataaagagtcatgtcccgcgcctctggacttggagtacattccaggctcaagtagcattccgccatggagaagaaagtctttacaaatgtttccgccgaggatgctagcacaggcgctgttttaccctaccgggagacaaagcgcggtctatcatcccgacatgtgcaactaatggccattggaggctcaatcggtactgggctgttcgtcggtatcgggtcctacctgcgggatgccggcccgctgtcactgtttctggggtatcttgtttgggggtgcctcttcatcttgcctgtcaatctgtgtgttggggaaatggccgcataccttcccattcgtgggtcgatctttgagctcgctgcccggtttatcgacccggcatttggatttgctatgtaagtcttttcgcgcctgaaccttgctgggctctacgctacagacgctaacccttctaggggctgggtatatttctacggtggtgtaatgctcgtctgtacggagtattctgcagtctcaacaatcatgcaatactggaacacaagcgtcaaccctgccgtctgggtagccatggcaatggttgtttgcacgatgctcaatcttgtctcggtcaaatggtacggcgagagcgagttcatcctagcgtcgaccaagatccttctcctcatcggactcgtcctcctcaccttcatcacaatggttggcggaaaccccaggcacgatgtctatggcttccggaattggaccgatggcgtcatgttcgagtactataccgatggcaccacgggccgatttttaggcttcttctccgtcatggtctatgcagccttctccatcgctggtcctgatctcccagccctagccgcaggagagatccagaacccacgagtgaccatcccccgagtcgtgaagatgactttctatcgtatcgtgggattctatgtcatcggagtcctagctgtcaccatcatctgcagccccaacgacccacgtctcatttccgcaattagtgacggtgctgctggctccgctgcttcgccttgggtcatcggaatccaaaaccttggcatcaagggcctgcccgatctgatcaacttcttgattctgctatcgggctggtcatgtggcaatgcctacctttacagctccagccgaacactctattccctcgctcgcgatggccaagcaccgaagttccttttgaaatgtactgcatccggcatccccataaactgtgtcctcacggtctcggttttgtcttgcatcaccttcctcgtggccagtacctcttccgtcgaggtcttcttctggttcgttgatttgaccaccatcgccttcgttctcacctacacgggcatggtctgtgtcttcatcgcctggtaccgcgccctgaaagcacaaggaatcgaccgcaagacgttcgttccttgggctgcaccatggcagccatacggcgccattctcgctgtcattatcggctccacgaccgccatatgtaatggcttctctgtcttcaagcctttcagtgtgcaaggcttcatcacctcgtacttcggtctagcgttctgggtcgtcatgtttgtcttctggaaggtgtatcaccggagttcgtttgtgaaagttgcagaggcagatttgtactctggaaaggcggagatcgatgaagagtgcaagatctgggaagaaggtggatgggccgaacggcggaaggcggagctggctcagatgcattgggtccggcgaatttgggagaaaatgtggtgattcactgtatacttggtgcttttttgtacatataccatctatcttattcattgaattatgttttcatttgatgtttgctatttccagagcctataaagactaaatggtcaccgagatagaatagcagattatcacagtcggcgagcgtagatagttgtaggataaactccgatttcaacccttagagtcccaatgtctcttttccatgtctaaatagaggcatataagagatgaagtatgtttcaaggttgtacctctcataaactagacgctctgattggccagtgcaggtgatgcttaagggcacgcaccggtggggaccgggactggaaaagaaaagttgcccggttcacctgggcaagcttctccagacctgcgaacaacatcaattccattatgtccaccatgtcaactcgctccgcctggcgagctttgcactatagtgcaaagcgtcgcgctttccaaccctctactccgtaccgttgtttctcctgtgccaaccgtgtccaggagcagaagccagagaatgaccgcatgacacacttcggcttcacgaatgtgcccgaggcagagaaggagattcgaggtaagaatcataatcaccatcttacccaattgaccatctcaatgcaaccaaacccgaacccatacctgaccaacatccccctacagtcggcgccgtcttcagctccgtggcagcctcctacgaccgcatgaacgacctaatgtccctcggcatccaccgcctgtggaaagaccacttcgtgcgatccctgaacccaggctcatgcctgcccgccctgaccgccgaccagcgcggctggaacatcttggacatcgccggcgggaccggcgacatcgccttccgcatgctggaccacgccacgaacgtcaaccacgacatggagacccgcgtgacgatcagcgacatcaacgccgacatgctggccgagggccgcaagcgctccctcgacacgccctactacaacacgtcgcgactggacttcgtcgaggccaacgctgagcacatgccgcatatccccgacgcctcggtggatctctacactgttgttttcggaatccggaactttacggataaacaggctgcgctgaatgaggcgtatcgtgtcctcaagcccggtggtgtctttgcttgcatggagttcagtaaggtcgataacccgattctggatggcatttataagcgttggaactttggtgccatcccccttattggtcaggttgtggcgggtgatcgtgatagctatcagtatctcgtggagagtattgagcgcttccctagccaggaggagttcaggggtatgattcagaaggctgggtttatgattcctggtcagggctttgagaaccttacgggtggtattgctgctatccataagggtattaagccgattgttaaggcttgattgcggacgattgatgtgtgttctgtactatatagacccgggactttgcatactgattgtattactatgagaaatatcattggcgttgatttgcatggtgtatgaacagccttggctgtgaggctcaggcttcggttgtaaatgtgcatctaaaaatgtatgtataaacaaagtgggcgtaacatcgtcaaccgaatgcatgataatgcgaacgatatgtaaaaatcaggtgtgtatatccaagaaagaaaaagaaaagaggacgcttttcagtcatgtcatccatccaatagatcctctgcctccatcactcctaagaaactgtcgggagaggccatatccttcacgacagcaacgacagagactgggtctggtccattttgcgattcacaaatagtacgccgaatctcagccagaggtgtcgagtctggcaccaagagccatttgctttggggtacaacgaatgaagtaccggggttcttggctataacctcggacacacgcacatccatatctccaccaggagaaagaagagcccgaatgcgccgcggagggattatttcggacgaagataacaacacccacgatttagcgtttgggtgctggatggctgtgagaaggatatcgagaagtctgacatcgtcaggcgactgcgatgacgcagaagcagtggggatttgatcgagcgaaaccagcatatctcgacaaatgacgcgctgttccggtggcgcctgtaaattgaaaggagggatcgatggggtgatttcctcccacggaagcgacacagacgaggttggagagtcaaacatcctcgttgacatgccgctcgacggcgtggttagcggtgtctctgccgccgccgctccaatagcaccaccaggatggaacccccggaatacctctgcaggactcttccctgttgcactgtgcagcttccgggccgtagcaatagccagcgcatcgccgagcgccaaggccaccgtcgtggacgatgtgggcgcgcacacaccgaaagaagactcttcgtcctcgtggatcggggccggtaaaagaatacccattcccgcagggccatgcaacgagagaagcggacatgtcgccggatgtgtatgcgacgtaagagcaatcaccgggacaggagcggggagatgcgggagcagcgataaaagttccgccgagcgaccagagaaggatatgagaagaattgtatcattctggataaaccaggtcagtatgaaagtttccaatgtcttatcacaagccaagcgatcgcgattgtaatgcgattataattcaaaagcacatctgtaggcgcaggcgcaggtgggcttaccggccgaaccaatcccaggtcgccatgcaaggcttcagtcggatgcaggaacgcgctatatacgcccaaactattcatcgtcgcctcgattttgcgtccgaccttcccacttttcccaaccccgcaaaccaccagtttcccaccctcgcgcacgctccgcgcaatctgatccacagcgcgggcgagatcgtgctgcgcccgcgcatcggtctggtagatgtgctcgaggtgggcgagagctgctcgctcggttgagatcacatggattgctgtcaccaccgacgagacatcttttggcgctgaaggatcggaggaattaggaggggtgagaggccacgagggttcgtgggcgggttcgaatattgacatggcgggtgcttcttgatatctatagcataatggctagaagtaaaaggaatttatgagtgaagtggtctcttcgcacccctgggcgccggttaacttgcgggggccgatccaagatcagtcgataacggaaggtaacagtgggcgatcggagatcggtgttttctcgtgtgagaccggggattacatacatcttttgcgtggcgatttgacagattactatgctgcaacgtacccctttctaatcttgatttcgtgccaatgtccatagctccgtctaaacccgtctggcaaaatggtgtcattttatgctataatggtgaatgtggaggccatacttgcctattggagtatttccgaggccgaggcataagagaacctaaaatattagtttgaacggattttgagcaatggaggtctattcaatcctcgtatgtatagagggtataaccaaaaaaaggagagaaagcaagccccgaaaatagtatttacatgccgttggccgcggggataattgcaagactctcccgctgatagtagcttctagcaagcgcagagaccatatttagaactcggaaatactccccaaactccaacaaaaaaaaacatcatctgtcgcacacgagaagacagaaggcaggggtatcgcatcaggatgtcgcgtcgctaggggtcattatgagtatgcctcaataggcagtagtaaatcatcgtatcatccttgtcgaccctcctgtttgtctttacccttctctgccgtgccatcatcctcatatagatgatgctgctcaatgtaatgaatgactggaactgggatgagataacgcacactcatctcacgtcgcaagaagagtcgaatctttgtgctgctaacatcattctgaatgagctgctggatgacatggatattgtctttccagggctgcaagctggccagggcttcatcgatatcggtgccactgcgctccacaatgaaagactgaaaggtgtattagcgacccatttctcgagcgcaggatgaaccgttctggatgttggaataaacttacgccatattttcctaaaatatgatccagatccttctcactccacacaccaggtgtggacatggtatggatcagatccgcaccggctaacagagcaatgcgaacgggcttccgggttccgtttccggcgtccacacccttacggacctcattgatttcatgatcaaaatggtccagcaccacagctgttggctgataggccttctgaatcggttcccatgtgtccaccatcaaccagtcggaggtttgatcgactgcaagttggcacatcgcaaccctatagatgaatctccgttagctccgaatagattgaataggatggaggtagaatcgcctaccgatcctccgcactggccaagccggctttacgataggcatccgacaccggcgataggtatcccccaatgatttcaaagtccgtgctgaatctgacgtgatcggcagccatttcgaacattctgaggtgtaaataggtaattggggagaaggaaccacaagcaaccagcaggagaggggtcttttctgggtctttcatcgtccgcctgaggcgatactctgggaaggtgtagtggtccatggaggcgggggtagtgtcggcgggtatctggtggacatcatcgctctgcccgccgaccatatcggctgccatggagagatagtgaatagaggaatatactagaagatcttgaattccggggaaggcaaaacggtatcggagaaaggcgggggagatgagaagtgaggatgagtttctgtgaattgcgaatggggggcgaaccgaaggcggcaagagaatgcgccggagaaggcgaacggaggtgaaaggtgaaagacgaaagatggaagaagtgaaatgtcgttcttttttcctcgtttcttcgcccttttctttttgaatatcacgttctagccctagagtttccccgtgattaataagatggctcggtgagtcaatccagttctactcggtgcgtctccgcgatccggatcgatcgccgttatattccactttgggggttcataataataatgaagagcgaggtataaattcagtttgataaggttatttgagctctcaaggtccttcattcttacctataacataggtacggagtggttcggttttatcgagcactatatatacatcaaggtactccgatggagtgagtatattaataaacgtctttgtctgtattcaaataactggatcatactaaatacaatagatgtaccatataaaaaaagatatacaatggacccttgagatattattccttgtgatattccttgccatttgtactgtcaggtctcagaccccctctatgcccgatatccaggcaagatgcaaataaggaaaccaagagagccatttagaagtaatcgtgcaataaagtattataataagtagcacgtataataggtaatgtatacagtatgtccaagtaactatacaaggacctggttagatcatcgaaatgttgcacttccgccgcctgacgctcgccgaatcccatcaaccaccacgtcaaaccctccttttctttttcccctttctttttaacccccccaccatctgaaaaattatcttctgtgtgaccggaattggtaaatcgttcttttcttgagatctcctagccccaacggcaacagtaacagctacccgaaacatcgttctcgccagccctctcggctagccttcgataggtggatggcgggttaacaacggtgacgactactcaatcgagattcctatacccgataacttatggccaggcaaaggccttccgccaaccgccaggaccctctcgaggattatcccgtctcccccgcaggcacttcggcctcttcttccctgaggtagtttcccattttcttcgccttcacaagtacactggttgaggttcagactcatattccgtggaccctcactgggaatctgttgatccctgagtgctcgtaccccccaatctgtcccctggattgttaagtggatgctccgcagtttcatcgggatccatcacttctgcatttctagattcgtcatctgtctacccaactatctgcctatcgctttgacccatcccggacttctttttctgtctttttctttcttcagaccctaatatcatcacgcataatctaaaacaaaagaccactttctcatgtcatccagaataactcgctcctccgcgagactcgccacagaccctccacctgctgagtccggtacaccgcttcaaacacctggctctacctcatcccggaaacgcaaggcatcctcccgccacgaccgacaagcagacgccccgatacagccagcaccggcatcgccccaaaggaaaaccaagcgaccgcggactgcagcatctcaaacagctccatctactggtcctgttcctgctgcaccccgtcgaggagcccgcagccgtacagccatgtcacaaccggggtaggtgatgatgcacattgatggataagaactagggctaacctcatctcagaccttcatctcgaccgtcggaggaatcatcgaaatcgacgacctccccacaaccatcgaggcgaaagtcaagtcggaacggtgagttttatggatgacaatcggccgtgtcacacaaatttgtatctgatgtgctagttactgatcccttctctttatttatagaccgacccgcgacgacacagtccccgccgccccgacgcccgaagaagcgttcgggcaagtcaaatcccgatgttttgatgagagatgcagaggaggaaatcgaggaggaagagcatcaggaagaacaacaaggatctcaaacgggagagagcaacgatggcaccaatccctcggcgttcggtgatgatgatatggatccgttccacagcagcctattcggtggcagaggccccatgggactccagagcactttacgtgccctcactggcatgatgagtggcatgtcatcacgtcttcgagatattctcaccaacttgagagcgaaggatgatccatctctccaattgatcgccttgcaagagctgtcagatctcttgcttgtatcgaacgaggataacctgtctggtcaattttcgccggacccgtatgtgaaggagctcgtgactttgatgcagccaaatcagtttggcgaagaaaatcccgagattatgcttcttgcatgtcgctctcttgcgaatctaatggaggccctacggggctccgtagctaatgttgtatatggtggtgctgtacccatcctctgccaaaagctgctcgatatacagttcatcgatctagctgagcaggctttgagtacattggccaagatttcagtcgacttcccagcctcaatcgtgcgagaaggtggattgaccgcatgcctcacgtatctggatttcttcccaaccagtactcaacgaacagcagttagtacggccgctaactgctgtcgtaacctccctcatgactcgttccctgtggtgcgggatgtaatgcccaccctactcaacgtcctctctagcaatgatcctaaggtcgtggagcaagggtgcctatgcgtatcacggattgtcgagagcttcaagcaccgaccggagaacctggaggagctgattgagcctgcaatgctcaaagctatccttcggcttctactgccaggaacaacaaacctgatcgggcctcatatccacacgcaattccttagggtattggcaatcgtatcgagaacaagcccacgattgtcaaatgagcttctcaagatggatgtagtggatacgctttaccaaattttgaccggcgtgtcaccaccgcaggatgtggataacacggccgttaagatggacagcgtgctagtcatgcaagcattgattcatcggccccgtgaacaagtatatgaaactctcaatgtcgtctgcgagctattgccaggcgttccaagccgcgatgcctcaaaaaccgacaacctcctaagctcatactttgatagccacatgtccattggactgagatctcccaaatctaaagagacagtggaggaaaggcggtccttgctcgttaattgcaagactgagcttaagcgttttgcgatgattctgttcccaactttgaccgatgcctactcgagcacggtcaatctgcatgtccgccagaaggtcctgattgcacagctgaagatgctgcatatccttgagccttctttgatcgaagacgccctgcgcacagtcccttacgcttcgtttttggctgccattctgtcccaaaaagaccacccttctctcgtatctttagctctacgctgcgctgagctactgttccagcggcttgaacatgtttatcagcatcaattccaccgtgaaggagtgatctcggcgatcatcaaactatccgaaggctctttgtcaggagaccaggagaacatcgattcatccgatccctcacgtataaacacgagcacagattcatcgcgtggtgctaatcaaattgttggagagactggatctggcggagatgatgaggatgaagacgatgaacccgatgactttgacgacgatgatggcgaggatgatgaccaagatgacatgtctgattccgaagacgacttcatggccggcccacgcagtcgacaaaagatggacaatgcgctcaacgacgtagttatccaagatgcccaagctttcctcgaggtatatgaagcaagccacggtgaaaccgttcgagcggaggctttgaggatcttgacagcactgaaatccctcgcctccgaaataaaatcacgctattcccgtggcggtgagggtggtcttcccttatttaaacagctcgcgtcctactttgacggagacgccttggagggcattaccagctcagaattgctcaactccggcattatagacgttcttctgtgtgtccttggtaactttcaatcgccctctatccgcgatgctagagccgacttcctgcgggcgtttatgggtgtttcaatctcggacaaggcccaaagccagagcaccgccacgacacctttcagcgtacttatccgcaagttgcaagacctgcttagtaggacggaacatttcgaagtccttaccattagtcacaattcgctagagaatacccgcagcaacgccgcctacatgctgagcaaacagctccgactcaagctggttgccgacgaagggtccgaagttcctcgtccttatcgcaacatcatggtgtcaatccatgccattgctacatttaaggccttggatgatttccttcatccccgaatcgccgtggcggaaaaacctcgcccctcacgaacaagggactcaattctctcacaaattgccaatgcatcccgacttcgtgaacagctggcttctgggtctgggatgagcctcccaaatcccacagggggtctccagggcactatgaccgatcccacggatggtgtctatgattcttccaccgatcacccgcatcatcatcagtccaatcggattcaagaagatgaagatgaagaggatgaggagccccttgaatgcgccgatgaaaggcaactgaccgacgaagaagaaggcggcgaagaagatgagggcgaccaactcaatgccattgttgatgatctcgatgaggatatggaaaatgatgatatctctgacccctcggcagtcaacatggaggtggcatcctcgggcaaggtcacggctcgcaaggaagatggtacccgaattgggacaccctcccagaccgctgcatccaagccttcatcgtcagctcctgccgctctccccagtcacacgcgcaacagttctctcgccactgccgggcgcccgttctcatcgtatgccgctgcaatggcctcggtgccccaggactggcaccttgagtttttcgtagatggcaagcccgttactaatgagacaactatctaccgtggtgttcatcacgaccgtgaggacttggacgagagtagtgccaagaacgtctggtcggcagtccacactatcacatttaagcgcgttcctggtcctccgccgccagagccctcaacccttacaccgaccgtccaggcttcttctgagggtgatgcccttgagatcccggcctctctcgacaaagacccaacaacttcatctatcattcgcctgcttcgtgttttgcacgaaatgaacgcaacgattgatgatatcttgaccgataccaaagactccgccaccatcacctcggagcccttggctcaattcattaacacgaagctcaccgccaagatcaaccgccaactcgaggagccgttgattgtggcaagcgattgccttccaagttggagcgaagacttagcaaggcttttttccttcttgttcccattcgagacaaggcatctattcctgcagtcaactgcatttggctactcacgggcgatgatgagatggcaaaattctcaaagtggtgaagacagccgacgggacttgcgccgcgatgatcgcccattccttggccggctgcagcgacaaaaagtgcgcatctctcgttctcgcatccttgattctgcattaaaggtcatggaactctatggatcttcccccagcattctcgaggttgaatatttcgaggaagttggtactggattaggaccgacccttgaattctactctactgtttctagggagttctcaaagaagaagcttaagatctggagagacacggacggaagctctaccacagaatatgcatttggcaagtctggtctgttcccagcgccgatgagtgacgaacaagcatcccaagatatcgggaagaggcaattaaacatcttcaaggtcctagggaagtttgtggctcgctcgatgcttgactccaggatcatcgacatttcgttcaatccagcattcttccgtatcgcggatactctgtcatcagtggcaccatccctaggcaccgtcaagctggttgaccacgacctggcgaagtccttggtcatgctcaaagaatttgtcaatgccaaaaacgtcattgaggcaaaccagtcgctttcgccagcccttaaatccgaggccgtgcaaaacatcacggtccacggtgctagtgttgacgatctgggcttggacttcactctacctggatatcctgcgattgagttgatctctgatggcgccaatgtgccgttgacaatcgaaaatattgacacttacatcgaacgggtcatcgacatgaccttgggtagcggtgtccggcgtcaggtggatgccttccgggctgggttctcacaagtcttccccttctcctccctttgtgctttcactccaagtgagctcgttatgcttttcggacaagcggacgaggattggtctatcgagaccttaatggactccatcaaagccgatcacgggttcaacatggacagtcggagtgtgcgcaacctgctgcaaactatgagcgaactggacaaccagcaacgccgagatttccttcagtttgtcactggtagccccaagctccccattggaggtatgtttatttcatttttctccacataaaatcccactaacacaaactcaaatataggtttcaagagtctcacgccgatcttcactgtcgtgtgccgcccaagcgaacatccatatacaccagacgactacctccccagtgtgatgacatgcgtcaactacctgaagttgccggactatagcgacctggacgtactcaagaagcgcctctcagttgccatcaaagaaggccaaggagctttccatctttcttagacctgtggacagctgttcccactcaaaacttccaccatctcctcttctctctcttctctttgctggcttccgctttttttgaccagaaattattcacgatgcgacgacgtgcgacttgtttctacttcgttcctctccaattcccaagttttcggacgggctgtttcgctgttcttgtcctttccttcttcatatgccatctgggtcgaaaggcgtcatggcgggggctccttacgatagtgatattagatagcaatgatcactttctaccaaaagtctagtttttccggtgtagatagtcttatattgaggtaacatttggtacaaatgtactgtagtacaaagactagtccaatgaaacatggtgaggacgtagggatcaattgccccattaaatataatggctatctcacattcctccgagatcaccgatggatcacccgtggatatattcatcagactgccgtgttgaatgaaataaaaccatccctatgccatggctgcccctcgggagattaccatcgaatgtctcaacggccgttgggttctggtaatgatactattccccttgaagatgctatattctaatcgattactgtatacagaataaggacctgaccagcgaggcagaccctattctaaaattggttcgaaataatctgtttctacaactttaaatcctaagctgatcacgtaccgtccacagcaaaaagtaccttggttgctccgcaaggcattcgaattcgcaacaatatacatccaaatctcccaataccaaacaccagcatccgaaacaagccaaccatctacgagtatcgactttacccagacagccacagcagggctggccgcaaccaaagaagaacgcgtcttggattggaaagtattagaccacgaggactacttcttcggcgaggtcaaagcacagagtgaattcgtccacggtgttattgacgcaggtggaatcataaggcctgaatttgagcttcagacggccatgtctaatgaccagattaagcaatacttacgaggtgagatccaggaggatgggagtaaatctaccggttttctagttgaggactggagtgggatgtctgaggaggggcctggtctttgggtacatacctttgagcggaatgttaagtctggctggacagctgagcaggtcagtatttatagttattgttggatgatttaaatgaaactagaggctaactgacttgggctgcagatttggggatttgagatgtttggggactcgcgatacttctctcgtcgaggggtgatcatgacgacgaggggagaatatatgtgtgggagaattgtgtttgatttcgtgagtacttaatgagcagtcttcgagaatcaagggggaaattaggaatcaatcattctacttatctatctatcactgactttatgaatctaaaactctataactatgtataacgcagggacatgatatcaactttccacacaaagacactctagctcgaataaaccgacaccatagactgtgaaaactgttagctaaatctaccacatacgggtagaataaaggggaactcacgtctgcaaacttgggctcaataaacaaagccttagcctcagcaaccattaccgcgccttcactgtcctcatgcagcagactagcatcaggaacaatggtatgcccgtccgcagacaggggcacggtcaaaggaagataagtcatgcggccctcaacccaggccttcctgccctcgaccttaaccgtctttgtgcgcatcacatacattcggtcgggaagagctggctttcggaaatccacattaagattcgccgtcatgcccagcccgctggggaaagccgcagagacacagcgcgcaaacacctcatcaaaaagaacagtgagaagaccaccatggacaaagccagggtgaccacagacgtcctggccgatatggaatactgatacaacgctgctggctcggtcggcactgtcggtccctgtcccagacttgccggtcgagagccacatatatggtgcgaatgcaagcttgcctacaccagtcaagctgccgcccacgaagtgatgctgtctaaggtgtggcgggattgcaagatggggacgtgtttccttgtaggtgctctgggttccgcgcaatttctggacgagagggacatgggaaacaagtttgtcgaggcctgtccgttcgttgtgcaatgactgggtctgagacagtaatggggatccgtcggtttggctagggagtgcttggtcatgaacgaccgccgaccggtttgggtgttgttcatggagacgggcaataggcgccgcaggcgagtatgttctgaatgctgaaaggggttgcgaccggaacagccgacgcgctgtttgtgaaatgtgcgacattctgggaagtatgtatgaagttgatgttgactgtagtgatgcatgttagaaggggatttcgagggacttgttagaatgccgaaccgaggcacggcacggagtacgtacatactgcagagcaggctcgggttattcggctcgtgagtttgtcgatattcctagtgttgatatgtagtttggatcaaggctaggtgatatatgaagtataccacacttggacttttgcagtgacgatgatggcaagaagaatgtttcgtaatcttaagaatagacccgccactctctggattagtcccgtttctgtttccagggtttttcttatctttttttaaggccgattttcccctgctggaaccaacagtggggctcaaagccttggaacagccgatgatcggaccgtaatgccaagagatttagttcggtatgccgagaactataagaagccgtagatccatgtcagtatattattcaacgtaattcaacggagaccgaagactgaagatcaaagggtgtagtattgttatattagcatagtatggtggttttcaatgggggtccttcctcgttggggggtcaacatgcagcacagaaaaactgttgtctcatggcagcaatcattctcgtcatctccccttctctttttcaatcaaagatcatcgtcatccagcttggatgcagcctcttctcttgtattagccttcatctcaatattgactctcaatcttatcatctcaagatctcaagatggtagacgaaactaacctctcttcttctgacgaggattctggccccgagactgtcagcaacccgttcggctctggcgtgggtagtatcccccagaccatcaataatcctttcgtttctggtgtgggtaataccccccagactgtcaacaaccctttcggctctggcggggacaatccctcccagataaataatcctcttgcttctgcagtgggcaacatcccccagggcaacaactcttctgtttctggggtgagcaatggcccccagatcaacagacctttccgtactcgctggggtccccctctgatccgccccatcgccatcgaagacggccccgtttcccccaatggaggattgaccaatggtcactcccacgtaaatgaatggcgcgctccccacccaacggacttcaatccgttgtacgccccgcccgacgacgagaccgacgatgaggcagaagccaaccctccacccccaaaccacgaggtggtggatgaattcctcgatgaggacgaggacctcgacgatgcctcagatgaggatgaaggggtctctgccccgtatggcaacagccagggcctggaggccagcctggatgccatcatggcggagggaaatgaggaggatgaggctgacgaggacgcctacctggacgaggtgtaggcaagtaaatgcttacttgaatgcaaggtatacatcacatttccttttctcctaagccccaatcagcttcacttcagtcttactatcacttcaaactcatattcgtttcaactcacattcgcttcattgctaactcatttccttgtcatctaggtgctggtgagggaagcggcgacttcctcatcggcttcctcagccttgcggtcccaccacggctgacctcaagcgtggtgggacacgaatacaatgatgaagtggtagggaggaattgggggggaggaggagattcttgtttgagttggcccgcggaggctgacgatgtacgatttggacggcgacatggggcgtttgctgtgtcactccggtctgcaggatgacactgcactaggttcgctcggcgtagctgtcatgcgggccaggggctactcattgagtagtcccgctgtattgagtatccttccttttgtgttgagcgtgtttgtttttgagctgcgatgatcacttgatcaatatcattttcatttcaactgccccttgcgacactcttattgcaccggagaggcacatcaagactggaatgggctgacaacagcgctgctgtggttcggaagcagggagagcagagtcgagccctcgtgggcccattccgaatgttatgcgcccacaatacgacaatacaatacgataccatacgatgcgatgcgagaacgaattcacgtcgcctttgagttgacattttggagcctgcatgcattgtcctaaactgacttataaagcgcagcaatcaaccaaaggctggctggtattcgcgaatgtaaagcggctgtggcggctgtggcggctccggctctcatgaactcactgcaagcagataaagatagttacttctactctgccggaagtaaatgattaacatctcgcatctctaggagcatagaagaactaatacaaagcggactttgatgctgacctacagtatagaccgaaaagttggatccctagtttaccgactccacaatctgtattccgggaaggccgaatacatggaatatagtccaataaagctattggtgcatttgatactgaccaaacagcttctagaacaaggtaccgtcgccaaagttcaagatgggactacactttgtctccggacgcttagccgctgcaagctcacgacccgctttccaagagcccgcctccaacacctgaggtagagacaattggacaccatccaagcgagcaagaatcttcgtatgcagcacatcgaggagagcaacagtcattgctcgccattccacaatctcatcatcgcccgcaccgaacgaaggcaaactaccacccgaaaggctcaaccctcgctgcagtgcctcgggcttcaattctagcactcccatgtcgacgagcattcctccattgcggtactccggcagaccagttcccagctcagtattggaccatgagactgagagcaggcgagagaacggtaccatcaacgagtaccctagccattgagtcagcttatggaatggttggatgttggagtaggggttcgactccgatccagcctgctgtgcaagtgctcgcaggggccatgcatcgccaatgggctgcccattaacgtgagtacgatcagacggccagatgggaatcaggaggcgctgtagcacgttccaaagatcccggtaatcgagctttccgctctcattggactttgcaatgaggtaatctagattttttgggaactgtttagtgattttcttgatcttatcggtggtatgaacttaccaacaagattgccaggacggccagagggtccaaaaatatctttcaagttcatcaaagactcgccgagtttacggagaatatctgcacgcgcagatactccgatcatgggattggcatcgtcgacctggagtccacgggataagatgtctacattgatatttcgcaatgcatcgcctagcacgagtcagccaatatcgcattgaatataagagcaaacgcttaccattgacggtgtgtttcaccgatgagttctggcccgcaaagtcgccgttgaggaacatgtgcagggccgccaccgcaataccttcgcttcgattcagcgtcagaccactttgtgcctccttgaatttccaaaagtctccagcaccggcatccaaaaggacagagacgaagaaaagatctatcagcctgcgtgtcttttccgtggtgtcacatttctcctcatcccattcagctagaagagtggctatgcggggaaccccgccaacttcgaaatgctgccagcgtccatgaggcggaatcaggtgatatctgtcagggccgaagtcgcgctatgatagagagtgagcttttttatgcttggaattggaagtgtgcgtcctgggtatgtgccagacctacctgaatcagtttaagtacgtagtcggtggcatcttccatgcgttcggggtggtaattgaaatgattcaaccgatcctcttcggctagtttgaggacaatatgggctcttgtacggacggcttctaggcctaatagttcttcaatttggggatccatgttgggagaatggaagaggtgactctgcaggttaagaaacgtgttttatttactccaagccaaagcgggggaacttatgcacttatctatacgtatcgcatttatcttggcgtgtggggctttcctatttgatctgccgccgcttttacgaatactcaggctcagggtcactgagtagatgtcagcacggagatcagtgatcatgctcagtcacgtgtagaatgactgatgctcagtgaatgctcgaggttgcattggatgctgtcagtgatgctcagtgtccaatcagtgaggtaacactattcccagaagggattagcccctatagggtcgtttagtactgatcacctcctacatggtcaatattcgaataagcaagtgtagggggttacttcatgaccattcgctttcgaggctactacatatgttgtacttgatttccaccgttgtttacttcaaaccccactgcgggatcggcgatcgtgcacgggcaccaccgaggtagaaacaccgtcggagagtcggagagaagtcggagtcccactggtcctcgtatcacttggccatgtctctcgagctgtatcacactgcatacaacgccggccagaccactgctgtactaacccatggcgccttggtatctggtctctactgggatctggtgatccccacctcacgtcttactagctcctggtcccagatcttccgggccatggcaagtccgccggtacgccattctcagtggatctcgcagcgcgacagattgtccagctgatctatacatacgcgaatggttcagcgcacattatcggctacagtttggtacttaggttgctatccgcctggcctataccgaaccagatgtggtgaactctgtctttatctcggggtttagaacgttctcttaaacgtcacttacgccgtatattctatatatagcgtgggcgatgatacgtatagagaactacctcggccggtctcttatcagctaggcaatagatggtaccgatatcccacgtattgatactaatgtctgtacccttgacctgtgttgccagattgtattaccagagcatcctacacagtagttatcaccatggcctgcgcgtactctgattgttgtagcgggggttagtgcctacaaaggatagccccggtgatgctgtgaagttggtggcgatcgggagagccgaatgaagagactatcgcgtatacgcacttgaaaatgcgacatccgtggaatcgtctggaaccgcggctctttgcagagactgccacggcgtggtttaaacataaggagcttcccgagggctttgttaagctttagcgtcgggtagacggggtttgaagatacataggagtttatcccagggcttggatccataaactccatatcaggaactgtaataatgacagatccaacagatccaagataaaatagaactgtggatggcaattgtcgggggtgctcagttttacccagtgatcaaaaagcggcaagaggtgagcactaatacggaagggaaaggtcttaaagtgccaggcattatccgcatgcccagcaaactagttatctttaggcaaagtgtcttgaatgccatcgactatcctcggccattgggggatccctttgtcaccgataggttatctgacacatatcggacttccccgataacgttgggctgtgcactttggaagcatttaggagtcaagtatatatcagtaattttggtatagactaataatcaacattgtcatttttacaaccccattgcttcagtaatttccgaattagaatgtcagagggtcaaggtggcccaggaacgcatcgttgccctcaccacggagaagagcatcgatgtcaatgcgaccggccgtaagatacttctcgctaacaccgatgttcactcgctgggaaagttgttgtttaagctccgcacgaagcccggccatttcggtcttgctcacttcgctagcctccttgtcacgtctttcgcggccaccaccacgaccacggcctctgcccttagacggatcgaattcgtcactgtcatactcaacgccgagatcatcggccgcagcgcggagccagttgtcctcggtgttgaccttctctttagcaattgtggagtctgtaattcgcttggcgagagccatgcgggggcggaggcgggcaaccactcggcgatcaatgtcgagagactcgagagcgatcttcttgctaggtccgtcggggtcgccagccttcctcgctttcttagtatggaccttgccggcgagacgggcaacaccgacaacctcctcgggagcacagatgaggatactcttcccggactcaccggcacgagcagtacgaccggatcggtgaacgtaggcgtctgctgtgcggggaacgtggtagtggatgacgcaattgatgcccttgatatccagaccacgggcagcgacgtcggtggcgacaagaattgagcttgggttggcagtaggagatgagaaacgttcgatggaacggagtcgggctttctgggccatatttgagtgaagtgcgaacacaggaagttgaagagcctgcaaaagctgagtgatgcggcggacagcggagatggagtttgtaaacacaattgtgcggttcttgggatagtagagaagaacggagtagagatagagatcctgatcatttgaattagtatcaggatacgagtggtctaaaaagaaagtggcttaccttttccatagcagggcattcgacaattccttccttgagtccaatggccatctgtgactccgggttcacatcgacgaacttaggcttctcttcgcggaaattcagcttcttgagaaggtactccatggacgctttgttgtccaacatatcactacttgcccagcggcttttgcctgctagcttttgttgaagatccttgtggaatgtggccgagaagacaagagtctgcctttgggatggctcctcgtcctcttcttcatgatccatgtctgcaatatctccggcttgatgtttgtctagtgcattaaggatatcttccatctccttgaaatgaccttcactcagcagtctgtccgcctcgtcaacgactaggaactggattttctgcattttgcggatcaatcccgttcctgtacttaggatctcccacactcggccgggagttccaatgacaatatctgcagtggcaagttgtctctgttgcttctgaatagacataccaccggtgataagagcgatccgcgcattagtgtccggggaattggcaatgagctctccgatatgctttccaagctgatgcgccagctctcgagtgggagatagaatcaatgcaatcggggatttgttcttttcagactgttcggactgttcctcttgttttcctctcttgtccaaataatgttcgataatcggaataccgaatgccaatgttttaccggaacctgtagaggcctttccaacaacatcgtgcccatcgagaatgagaggaatactggctttttgaatggctgacggggagctgaacttcattttcgaaagagctgtaaatgtctctggcgaaagattaaggccatcccaagccgacacgtcgacaccttcgtcctcttcgacatcatccagagcagtgaatgagagcccggccttgatgttctggttctgaccaggtttggactctttagacttttgctccttaggcttttgttctttggactccttcatggctttgttttgctccttcttcttgtccttcttcgacttcttatcttccttcacttgagttgtagtgggagccttctcgatggtaggtgactttttggacgagtcctcatcgctaaaaccaccccattcgtctccgtcatcttcggacgggggtttgataatcgattttgttggcttgccagacttggcctaccacccaaccacagatattagcatttagttcaacatgatcaagcaaaacatgcaatttcataccttgaaatgaacacctccgtcgctctgttttatgatatccacaccctcaatctcttctagtccaaagaaaccttctgcatcatccattcgatctggcatagcaacttctttccagttgaggtcctcaacaccgagagagccatgatcgtcgctcgaagccttgtcagacttgactgccttcttgcgtttgtttgcctcagacacctgggctttggggtcgcgtgctcgcttttgacccattatgaactgagtaattcttgagtattacagtgtgttccggtagacaagtgatctaattacgccgtcggggagaattcgcaaagaaaaaaagcggcagaaattttagtccgcctttagaatcttatcttttcagtccccacgttcgccgcaaaattaacccactttgacagacaattgcgactaagcagacattttttaatatgggtaaatcatccaaggataagcgcgatgcttattatcgtctcgccaaggagcaaaattggcgcgcccgttctgcgttcaaacttatccagattgacgagcgattcgacctattcgagcacgagaacccggacaatgtgacgagagtagtggatttgtgcgctgcacctggaagttggagccaagtactcagccgtgttttgataaagggcgaaagcttcgggcggcgggcatggctcgagaaaaagcggaaagaacaacagggattggagggcgcagagacaacgacgggcgatgacgatgacgataaaatggaatgcgatgagccttcttcgagctctgaattaaagccccgaaaaaatgtcaagatcgtatccatcgatctccaaccaatggcaccgctcgaaggtatcacaacgctcaaagctgatatcacgcacccctctacgatccctcttctcttgcgcgctcttgacccagaagcatacgaacaaccatccacatcctccgattccccacaatctgtcacagaggctatcagacaacctcaccccgttgacctggtcatctccgacggcgccccggatgtaacaggtctacacgacctggacatttatattcaatcacaactcctctacgcagcactcaaccttgctatgggggttctccgaccaggcggcaagttcgtcgccaagatcttccgtggccgcgatgtagaccttctctacgcgcaactgcggaccgtctttgagcgcgtcagcgtcgcgaagccgcgcagtagtcgcgctagtagcttggaggcattcgtggtctgcgaaggcttcattccacccgttactgacagcggggtggtcggtatggccgcactgaaaaatccactcttcggcggagccgcagctccagtagccgtgtcagaagacggcaatgtgggcgtggaagttcgcgatgaaatcgaccaggacacacaaccccggaatactgcggcgcaacccgcgggaattagcactcctgcgcccaaccactctattgaagtccgtcaccttcaaatcacaaaaccacaagaccaggcccaaccccagaaactgtccaacaagttcgcggttgagaatcggtggattccgtcgttcattgcttgtggtgatctttccgcttgggattctgatgcatcatacaccctacctccggactatgttaatctggatcctgttcagccacccactgcaccaccatatcgtcgagcattggaattgaggaaagaaaagggtggtgcgtatggcaagaccaagtatggacccattcgtcatgtttgattgttacgttaaatgagttgcaagcaaaagttgtatgtatagacgacatagacacgacatagcattttcgaaggtcatgctaggaaggctgtcttcgaagcagatacccaaatacattccattgaattatatatacttttaatcaattgaggagagattgattcaagatgttgatattctaaatgcatttttgaagtcttccaaggctggtgcgctagcccaaatcaggatctacatacaatgaggggggaataaaagcaaagatatgccaatcgtgcaaccatgccatgcgaaaaagaaaacaacagagtctaatagacctccaggacatagcgctcgtcgtccttcagcttctcaatctccttgcgagtctcaaccttcttaccgttcctcctggcttcggtggcaatagcctcctccagaacagcggtgacatcgggcacgggccaagtgggaccacacaggtagaaagcaccctcctcacgaatgtaggcctggatgatctcgggtagggtctggcgcatacggtcctggatataaattttctcaggttgatcacgagagaaagcagcgccgagcagagtgatgacaccagcctcctggtaagcctcccactcctcgccgtagcagtactcctcccgctggtgacgagagcccatgtacagcaagacagcgccaatctccttgccctgagccttctcaagggcacggtgctggacgaaggcacggaacggtgcgagaccggtaccaagaccggccatgataataggctgggtggatttgggaggcagcttcatgacgctggacttgacactgacggtgatctgggagccgacttcgaggcggctcaggtagcgggtggccagaccgaagcggtcgcggccgttggggtcgacccagttcacggcgacaatcatcagggccaccgaggtcggggtcactttctggcacgaggcgatcgagtactcacggcgcttgaggggaccgatgatgcggacgatctcgtggaagtcggggtgggcggaggggtactcaagcaggatgtcggcgaaggtgatggtgtcaacttccgcgcgacgcttgaactcagtggcaccgtcaggaccacacagggtgagcaagtcggtcttttccttctcgtcagaagcaaattcagcaagggcctcgtaaaagcgcttgggtgggcgaccaaagatgtcgacgttctggaccagagcctggtagactgtgcggttctccagaacggcagggtcctcacggctgggaacctcgacaatcgcgtccgggtccaagccgtagaacgcaatgaaattcttaacgtcctctggatcgttctcggcatgaataccgagggcctcgccaatatcgtacttcagaccagtctcaccgagatcgaactcgatgtggaagatattacgatcataggtagtaggggtgagacggcggttctccttgacgcggacagtgaaagtcttgtgagcaagatcggggcggagggcatccctcgtgccataagcctccttgaacgcaaggccgcgtaccgcggtctgccagtccttgagaagagtggggggctcagactcgtccttgtcgaaggaaacaaagctgttggcgatgatgtctttggggagctgaacggcatcgcttacgccatcaggctccttccaagactcgggaacctcgatctggcggagcagcttctcgagatctttgattacatcgaacagggcctcggcatgaccggtgatcgggaacagcttctttattgccagtgcttcctgggtagggaaagcgacgcgaatgaacgaagcctggagaacaaaagcgtccagagacgagtcctcgatagcagatgggtcgacgacgaagacggagatgccacgctgggcgacggcttgcttgaagatagcaggaagctttttctccaaatcctcatccttgatgcccggggcattcacaatcaccttggcgttatccttgacagaagccagaacatcaacatcgttgagcagcgagatgttgccaacgtaagtgacgtcggcactagttaccgcgtaaggtgcatcaacaatcttagcactcttgcggatgtcaacgcggatggcaccaccctggacgagattgtcgtgagtcttgctgagggtgacgttgctggccgagtcgacgccaagagcctggctcaaagtctgagcggctgtctcggtaacggaggtgtcaacatcccagaaagtgtattcctgcacagacgcagggtccaacaactgcagcgaagcgttggtttcaccgctgacggtgagaataggctgatcatacacgcgctggaatacagcggcggtggaaataagatcccagcgctgggagcgggggtacttgatctcaacacaagtcgggttgtgatcacggccagtggcgaaagtcaaagaagcaagcacatcttcatagagagcggagtggatgccctcttcctgaacagcttgctcagaggcgacctggccgagaactgcgacagtcttggtggactggggaagaacgcgcaggaactcctcctcgatgaagggacggtagacccggacattcacaacaccgacacggacaccatccttcgcgagagagcgtgcgatttgggcggtcagagtagcctcaacagtgccaaaggcgatcagtacagaggtgggctcggagtgaccgtggtactcaaaggcactgtagtcggttccgagttcaccgttcagggtcttcagcagatccaaaaccttgccttgggcgtcgaggtgacggttgcgggactcatcgagtgtcttgcggacggtctcataggtgtgagtcagtccatccttgtcgaggacatcaatgactcgagtggtatcacggccaacacgaacgccatcatagatgtggatcgaggggaggactgaggcgagcaacgtcgtaaagagagccatgtgctgcgactcatgagcagaaccgctagagactagacccagaccgagatcctcagccagggagagagcagaggcatagtcagagactaggccatcctcgccggcgtagtctacggcggcgacatgtgcagcgactgggctagcgacggaatagagcaaagagagttgctccaatgcggagcgcatgtaagggagggttgctgaagaagcaacgataccctgggggatgtggcgcttcttcagatcaaagtcctgagagaaaaggtagccaagagccatgttgccggcaccctggcgggtttccagagtcttgactgagggagactcgccattggcattagtctcgcccttcaaagtccattccttgagagcagcatcaagatcgaaagtttccggcgagtaggagaagatcttgtcactcagcaagtatgcgacttgctgaatgagtgtctgggctgtaacatatgtcgggccactcaaggccgacagacctggaactgatgaacccatgacttcttcttaacaccggatataggaccgatatttgttaagacaaaaaacaaagaagaaggtggggagaaagagaatgtcccctcttcatggcttggttatagagaaaaaaccccaggtaacttgcccaaagcggttagtgtaaattgcgtgcttgttatcgggcgataagatttttcaaggcggtcaaaagtggcgcccgctttcggagcatcggccgtgcctgaagcccgagattatgtcatgaagtaatgcaccagccacgtgatgtgtattcctgtgcatacttgtgcacggggccgatctaccgcaccgagcctcgggtcaccttaccccagaatgcggagaacccctcataaaatattgatcttgatatgtaaacggcagagtacgcatatatacatagttcaatgcttattttcagctactttttctgataacttatctctttatcgagtcttccatcatggcatataactcaccaaatcccatcccgttctcagagccgccttacattcgtggcctcccttctccctacattacgcctgcccactgccgctttcaacaagcatgtcgtaaatttgcaacagaaaacttgattcagtatgcgttggagtgggagcgtgaaggaacagtccccgagcatgtcttccacacattctgcaagcataatatgctgttgcccaacatgccagccccattacccgtggactggctgaagcgactgggaatccacgatatcatgggtgtcaaggttgaagactgggactatatctacactggaatttactgtgatgaggtacgccatgagcatcagctatctaactacgctttataattgctaggtaattgaccgatggtttgccaatagatggcccgttccggtctcagtggcccctccggctctctgaatgctggcttcgcttttggaattgcaccaatctataaatttggcagtactgagctgcaagagcggttcttgcctgcgctcctcacaggtaagaagcgaggctgcattgctatcacagagcccgaggctggtagtgatgtcgcaaatatcaccacaacagctgtcaagagttccgatggacagcactacatcctgaacggatcaaagaaatggcaagagacaactctacagtaataatagagctatgagctgacaccaataaccaggatcacgaatggtatctggtcggattatgcgaccatggccgtgcgaaccggtggaccaggagccgcgggcctttcggttttggttgtacctctaaagggccaccccggtgtctcaatgcgccgactcaaagtctcaggtcagatcacaggcgggaccacatacattgagctcgacgacgtcaaggttcctgtatcaaacattattggtcaagaaggagacggcatgcgtatcataatgaccaacttcaaccatgagcgacttgttattgccgttggagttactcggcaggctcgtgtggccctttctgcggctttttcatactgcctcaagcgtgaggcttttggaaagacactcatggaccaacccgtggtccgccaccgtctagctaaggcaggcgccgagctggaatccatgtgggcgtggattgagcagatcttgtaccaattggtccatctcagcaaagaggaaggtgaccgccaacttggtggtttgacggccctggctaaagcaaagtctgctatggttttgaatgagtgtgcccaaacagccgtgttgttgtttggggggagtggatttaccaaatctggtcagggtgaattggtcgaaggtatgttcgccggagtattggtatgtacttggaacaagctaactatgcctctagccattcttcgcgatgttcctggtgcccgtattccgggtggatcagaagatgtgctgcttgatttgtctgtgcgtcaattggtcaagctctatcaggctgaagagaagaagttgtcaccagacgccaagatttgatctaatcatacatcaacaattttggagtgtcaactactcggactttttcgcataatatactcgaacttgaatttatgtcattacacagtactgagcaagaaagctagattgtcatttgcactgacatctagagcaactatgcaataagaatagcaaccatcaaccaatactttccttaacagcaagatcgggattaatctttaactcgtcgtttcaatttggactttgatacccgtaaacaactgctcggtggcaattcccacttgcgggcgacaggtttcttcttgctcattaaatctttcagcagggggtacttcttcgccactgacgccactgacaaatttcgtggacattctccgtcaatagtttggtcttcataagccccttgctccaagagtagcgctatcaaggcctcattgatcacatattgcttcacagctttcatttgatttcgggttctcaaaagcttccaaataattttgtttccgggtttaccacggcaacgagtactcgctcctggtttgaaaacaagtttaaagatgtccggattctcaaatttggcacctagtggtctcactcccttatggtttcgtagattaacatcggcgccagacgccaggagcaatcgtacggactcctttgggacttttgggactttctcaatcctagggtctgcttgatggcctagagcaatgtgaaggggagtgtttccttgcgaatcttgtgtgtttggatcagcaccagacgccaagagcaatcttacgaactctgtttgggcttccaaatctccatagaatgcgtaacagcctaaggcaacgtgaagtggagtgtctccgtccaaatcttgtgcgtctaaatcagcgccagaatcgaggcatagactgaacaactccttcgtcgatttccattggcctctaggaatattgtgtaggccagtcgataagttgaaactgaattggaaatttggatttgccccgtgagctagtagtaacttgaccacagcaatagcctcatcatcttccttgtattcccaggattgctgccaggattgccgcccagatttgttataatttgggtacccacgtgccagagcacattgtagaggagaaatacccctcatcgtgtccgcaatttctacctgggcgccatgctggaggagaagtctgctcatgttgtagtctcctagagccgcagcatatcccaaggcggagatatctgttccgatgttgacttgggccccattgcgcagaagaagctccacaatgttcgtacgaccgaaaccgatagcaaggagcaaaggtgtgttggtcagggtataccggggctttattgggatgttcaagtctaggctgttgcgcgatataatgtgctggatattcgattcatatcccctttgtaacagccatcgcagtacatcatttctagtacgtgtgtcttgcttgtaaatggcatgaatcacagcatcatggatcatgcgattgcatcgtagaagtgaaaatatgtatctgtaccatggcagatatgaagcaacaagacagattacttcggagggtaaggagccaagagacatcttgaatgaaactggaactcagtccacacacaacaagtaggacaattgacggaacataagtagttgaggagttacatatcgtgatcatcaattcagttaacccatgtttagccctaaagtttctggagatgatgagcctactatgactcaatgagatacttgtataggtatacttaaccacttattaatcgtctgttgatatctgcttaacacttagtgcatagtggttcttgaacagcatttcctgctcgtttagtaggcgtcctaagtggttaccttctgcacgcattgacgtggccatcaatcatacatacaagtctaacttccaaatctaccttggaatgaagattcagaaaaagtgtatcttatcccatttcgattattgctctttggagagagtatgcactattataacatcaaggcctctgttatcactttacctctctcacttcggtagcacaagaccccggatactgggcatttgggtgaatctggctgttaagaaattggtctaattaaactggtcgtctgggttaataagtaatattaaacattccatcaatagatacaaacttctcaatgttccaaccagcttaattagaaaatgtagctgacgacgcaaaactgcatcatgctttaccccttttagatagccacggctttagagcagaaaatagtccagcaccaggaaggtcaagaggacactggccagagtcatccgtgtagtctggacagacaccgtattcaagaaccaatttgatcatagcatccatctcactgaagtcaggaaacggttcccactcactcaaatcctccaaatcttccgtatcctccaaatcttccgtatcctccaaatcctccaaatacttcaggaagcgctgaagctcgtcggttcttgggtcaaaccaggtggttagcccattccgtatgaggaaattcaggagctgagctccttcttcgccgtggcattggactttggcgcccgcatcgaggagaggctttgctaggtttatgttccatgggaacgacactgcatgaatcaatggcgtactcgattcgtggtctttcaagtggacgtcggctcctcggctcaggagcaacctgaggaatccttcttgtgtcatatcatcacggaatacatgtttgataacgaggtgaaggcaacccccttcctcacaccacaaggagttcacgtctactccgtacttaaggaccaagtgaagatcctcaagtttttctcgaagtatagcgttttcaagcaaaactgtgagctcgtcggggaaaaatttagctccgtgagctataagcaatttcgcaaaggcttcagatcctcgggcgtcgcggtattgggtcctgaaaacacgagatatgaccgacgcccccacatcatccattgcgtgtacatcagcgccaagatgtagcagatactctatgacaccatcatcaagagacccgtaatacagtactgcatcatgaaggagaggggcctcgttcacattggcgccatataaatgcagcacctccaccactgacctgaaatcgtagttgaaggctacttcaggtacgtcgggtgactggagctcacgcttgttgtagcgaccagcctctacccaagccagtaggcccccgtgtcggatagcacgagacagagtgatttgatctcttatcttcgcgcctttttgaaggaggaaaagggtcataaccgcattcccccgccccaccgccacttccaagggggtgtagggcatggtgtcccagggagggtagtcgttgctgaggtaattcacatcggctccatgtttcaaaaggagatctaccatacccaggttatcatcctcgatagccaagactagagctgattttgcttccaatcctatgattaggctccatcttccctcgtatgtcaagcctcggttcagatctactttccaggacaatagatgacgcatcccttgcatagcaccattcattgcacaccaatataaggcaagttcccctggatctgtatcaaggtttcgcttgtaaagatcacgaattaggagatcgtgaagatctctgttggtgcacatcaagccaagcacatctttacacggtagctctgacactatcatgtttatgatttcgagtggtaacgaaaggaggggcattttgaaggtcagtggccgggagcaaactgggcgattgaggatatgaggttgagaggatgataaataaacaaaacacgcgttgggactttatttcatgcacatatccgtgacctatgtgatttttctaactctcatactggataactaatatattgagtgagatctgaatacctgaacttggcctggcagcaaattaagcataattacctgaattagttaattaccattacagagagagtgtaaacctggaaaaattcatgaatttgtatgcccaaagtgtatatagggtcgtcgggccgggttattccgtgctgtaaatagatgccggaaagcgatctacattcaggcactcaggcattcaggcattcaggcattcaggccctagttatgagtatccaatgagagatatgcctggcatactcttgcttatctccaccgtccacacatgtatttactatgcaagacatctctgtatatgtactccatatatagctatatatatgaccttcttctagtaacatttggagtttaaatgatcgatttagcttatgtttcctctggttgtgttaagccaaagttgagcttaccgaatatagcctagctcgatatcgggatgacgaaagacactggcgcctggctggattcgagggtgcgcctcttttgctgtacaaacaacggacatctactctaattacaacttcagatacacaaaaatggtgaacgtcgcattgatcggtggtactggtatggtggtaagtgtaaatcctgcaagcaaagctcctcgatttactggtctcgaaattccccaagccgagcatacccaggctagaacttcagctaaattgcataaccgatagggctctcaaatcctcaccagccttattgccaatcctgttgtaactcgtgtggacaccatctctcgccgtaccccgtcagccactagcggcgcgcccccagccaaactcaccaactttgtctctagcgataccgccacctggtcaagccagctctcctccctaagcccgacccccagcatcttcttttccgcgtttggaaccacaaaagcagccgcaggcgggttcgataaccaatacaaaatcgagcatgggttgaacgtcgagctggccaaggccgcccacgacgctggcaccaaggtctacgtactgatctccgctaccggcgccaacaaggattcgaactttgcctacccccgcatgaagggcgaaatcgaggaggatatcaagaagcttggctttgagcgcatggtcattctgcgtcctgggctgattgctggtactcgtgaggaaagccggccgtttgaggctggagttcggttcattgcgaattgggctggcaagctgaattccggcctcaaagatggatgggcccaggacgcggatgttattggcaaagctgctgtcaatgctggtcttaaggcactagaaggtgatgttcccgagggcagtgagaaggtttggaccttgtttggcaatgatatcatcaaatatggcaaggaaggctcgtcttaaacgcattgatgcgttcgaataagctatgtatatgcaattattatccgtatggtttgagatttatcacgttatgcggctatgaacaaattgtctggaaccaattacttgatggcattgatcgaaactcaatatgactttattttagaaatgctgacctccctgcataacatgatcatttatcgcctgcggtactataaacaaagaaagcattcaatctcggtatgaaacatgagtcccatcctccttcacatgaatactacgagccttatttggcgtcccgcgggagctggaaaccccacgatcctgattccgaacaggtccgtcctcctccttggtcctccaagcgctggcatccctattggctgggctcatatccagcggactcttcttgccttcttgcctgctttccttttcattggccgcgagttcgctctccggtgctgtgttcgtcgggtcgaatgaagaaggatgtttggccacttcgccgtccgtaccagatttggcagtctctgagcgctccgggttcaaggtttctcggtcgagcgggccctgacccttttcgatctgggaaatcggggttgtgctaaagggcgttcttgttgctgtcggggtggcgagggattgaatagtaggtttggggacctggctccgggtggcttgctggccggctgagataatggttttccacattctgtgagataggaatatatctggagatgttttcaggtgcagattgtagtggttcgtacagatatctcgttgtggttgagcttgggtatcgaaattgcaagatgtatgttgtagtgaagtgaatgagagggaaggaacttgttagataaaatttcttgttaactattaggggaagtccattacaagtagtctgtcactcttctctgtgttccaagttctctagaccctaggatcatattgacgtcacttggtcagaaacagtcaggctaacccaatatggtaatgagcttgcccttgccctaagtgaccggcttgataatggtatcacaaggcctttgggggttttagcactgagttgcgcgagatttatatattaattcactcaaatctatgtccggatttgcataatatatgccacagtcagaaatgttctatcatatgagcagactggattatggctgaagcagtagtgaccaagactgcacacaatattgaacccgccatgagaactgtcttcggccactaataactaatatactaccggtcgaacttcacacaatgtagctccaggtcatattttgacgactggcggtccacgagccggtcagaaatcgccaaatgatgtatggcgaggtgacgctgctagtttataacgttctagtaataggcagaggcgccgtagaggggcgtcaagtactcgaggcggacgaactggctcgggattgaagcgtgcccagactcgtcaggatattaggacaagatccatcggtcttgtgtccatccaccaataccatcgaggtgtcagggtggcctagcgcaaatataatctagggtaactcatatcgaacctgaatggaaaatccgaaattccattagccaattagcaatgattacgaggtagaagggtctttggatattacatccaacgtaggttctagtaagtgatggtagagaaaaaggaaaaaaggaaagagaccctagaatctgatttagtgctgtcttcttgatgtgtaccacaggtcgagcatttacacatgggaggaatttcacgacaactgggaacacgtcaatgtgagggcccactcagagaagtacgatctaccaatgatggctagtcgtaggcctcactcaaggcgagtgctgatgagatgcacatgcctctttggtgcaggacgggtgggggaaagtctcactagttgcatacaactgacatcccggctgacggttgccattggatgattgggccggctgcaggtgaggataagtcgatcggtcgaccaatccccgtacgctcaaggaaatgtagacagtgggctttttactgtccagcaccagaggtataattaccatcaacgatttgtcgccagttaaaggcaggcgtgtgtagggtgcgggaacctccgttcactatcagatcacgggatcagaaaaacccgacgctgtgggagcctatatgcgggtcctagaattcaattctaacgttgaggcacgggcttcctagttgatagcactcaaaattgtctgcggtggctctgactagataaaaacacgatctagtatttcactgggcaacttcgcctgttgggcagaaacgacaaccatgctttgcccacacccacggcctgatccttgcgaggagatttcggtggtaagacggagcgagagggaaaagagcaggggggcaatagaaggtgattcgagggcttcttggggctggatgcaatgagcttgccgcagcaaagtattgatccaccgggtgtgacggccattttgaggctgtgagccatcatctaggatgccagttgccaactcaacatcttgtcatggatcatcttcctaggtccgattctgggcgtaattgagcggcatttgccgacgatcacttgtcgtactggtgtattgtccagaacaatcggccaaaacagcaagcacagaattctgcaggattttccatttcatattggcaatctgtcatatttcgtcattgcaaataacgtgaatggcatctgggtcctcggtggagcttgcagagaatcctaaacggcgatccacggccttcgacccagccttcgctactaggaattggtgcagaaagccagaaacaacgtgccacgtcagagtctctgggctttggtgcagctgcatatggttcagtaatatgtggaatgtatcacggttcgtctgcggcgagcgccgtacatcaatccgatcctatcatttccgccataagagcaagtgggtgatgatgaacacacatatgagcgggggcaaatgcatgatccctctttgcaggagtgagagatcagctgaacgaaaatagatctatctggcctgcatccctgatttcggaggtgtggcacaagaactttcaattgcgtgttccgtgtccttaaacccgagtgccaatgatagagcctcagagactctagcactgccaattaagtgagtgctattggctgacagacacggaccggaaaggcgcagcaggggtcgaaagacggccgagtctgaattttgatagactggcgattaaggctcggcaggaataacacaaggtgacaggggttaatggttgcaaccacatgctgagacccaacatggattaccatcattgcccaaatgcaggaaacgtaagagccacgaggaggaatgaaggcaataattcgggatgtgcatgcatctgcaatcacacagacagcaatatcggatagatacttctgtggataaacatggcgttcggtcagaatcccgtgtcgatgctcatgatagatgaggtaatgagccaatcaataatggcagctatcaaaaaatcgcttcaggatagaacaacccattggggtggagtcacaagtggcgtgcagagtcccgtcatattcgcgaaggcagtagcttttctgttgcatagagacagggttatccctgggcatgaaagcctgattattgcatcaatacgacatctggcaaatgccgggaccgactcggccatgcaggagtagccatgcaaaacgcaagagaatcacaagcgtcgagtccatgcgaacagcatccacatgaaagcggggagaggcagatggcgacagcataattgcagtagtcgaatctggaaactagagtattgcagccatgaattgagggattttcggcccatcgtacatcatcgccatgaggcgggaatcgccacggctgatggttgcatgcatccatgaagcaaccgattgttcacggtggctccattcgagatgcaatggccatcataccgtctccactgcttggagaactgctcacagccaaccggatcaaccgtcaggcaggtgcgatgtgaaatccacggactggaaccacggatgataagccatcgggcactgagaaacgtcgatcaacagtgggacgaggcaaacatgggagaatagagtcgtggcatacaaacttcgaaacataaataagcctgtcaacgcccctatgatgctgtgaagttcacaatcatccctccggtttcacaattcgagtctgaaatcttcaagccagtccaatagatcttcctcataaaaagaattcattcgaaatttgtttcaactttgttgagcttctcgggtcctttcaaaacacagacaaaggtcggcctatcaaatccgacaagctcgggtgctgtcaggtgcaaccaatagcagcccgcattcaagctgaaacaaagacggagagccgtgagcaagtgagttatgttgtacttgcagtttgagcagcactgacagatctaataggcatgtgcttttacaaccaaaagagatttgcgtgtggagactggagctggaccagctttgcccaccgatgcaactatgaatatcgcaccggcgagacatgcggtatgagactcgtcaacatcactgagaatgagaagaccaattgtcgtctctgcgaaaaaatcgagaccaaaaatcgccggcgtagtgccgaagtcgaccgtttggaccggtggaagcgagagggtgccacacttgtggcttccattgatcggtctcacaaactcattatggacttggataaagagatccgcgccctgcagcgggagcgggacgaacgaaggagcactctcctaagatagggttggcttggatttgtaaaaccggtattcctttggttaatttttcttttttcctctttcccttttggacaggtgaataacaatgtcttgacttttgtgtcgggtccttcgtgggccaattgtcctatcgttttcttgttgcctgtcactgtttctttagggggatgcagcgaatttcatgtttcaccatttgtccgcgacattaagtccaaatcgagtttctgcaaggtgatgggaaagccgtatcgcctttgaaaagattgaggagaaatttaattggttcaaactccgtattggtttttgttgataggctgttaagctcccaaaaaagaatgtcaatagggactagcccagtcataagcgccctttctcctgggtgagcggttcgctgagacagatcgagtctcacaggacaaggagtggaacctgctgcagctagacaaaaaagacatcgaggcctgacaaatatcaaatggccattcataatcgaccagtccttgaaggaagagcaatggtacctggtgtcagagcgagtgcacatagtgggacaaaatgcccctcacaacacatgcccgcacgtgatgaccacctgcttagataacctaatagaatgaacctgtcaagaagatatcttagtggcaccatagaaaagaggcgaatgaaagtggaagtggttctgctggttaggagtgttgtgagaagaatccagggctagctgggctaaataggttccacttcccttgctctatgccgtggataactccgacattgcgaaatcaatccagctctaaaacgatagctttgggcgatctaagtaaaataatgacaagtttagtaggtataactgaaattgaaatcgataaaagtaaaaagtgaatgcggtagtgaactgaaggctacaaaccagcaagttggggaactatatatcacggcactataatcggagaatttacttctacatgccactaagcaacacccgtgcttcttcagcctacgtgtacctatctgcttcaatatcttcaaagcacaaagcgtcaaattggaatgcagaactgaaggagagcgctgagactaggccgatgtgcatgccacgtcacaagagaacagcaccaaatgcagccataaacaaaagcccacacgacagataaaagatcaatgttttgtttggacatgaggtgatgctatgatattgcaaccgaatgattatggtcaaactattggattcgagtacctgaaacggaaaaagaacaagagaagatttaatctattttatgtcaccagcctcgggctcatcatcgaccttggccagcccttgttcccggagaagggaatcaatctcatctgcagtccataggtggtggtagatcttgccatccttggtcttgcccactgttgcaaactcgactgcgtaaggtagaaatgttaggacgaaaacacaatacagaaatgaccgtagaactcactcttctcgctgctcagctttgtggagtccatagtcttgctcagcaccttgacagccatagcacacgcctccttcagattgcagtcctccttgtaatcttgcttgaggagactctgcgcacttgcgttgtttgcgccaacgctcgtcgctttccagcctccgtaatttccactggggttactctggtacaactggaattgacggagatggtcatacccagcgtagatgaaggagacaccaaacggacggagacctccgtgttgggtatatccttgcttcagatcacacaatcgacggacaagttgttcgcatggaatgtcttcgttgtacgtgaggaggtagcgttgggcgttctggcgagcatagttgatcagaatgttggcatcggcgttcatacccgcaacagcgcagatcatgttactggaaatcatcagctacttatctcaatactaaacacagcaaatctggctattttatttgagacaaaggtagtgttggcgtactcgttgattgtgtagagcttctcagcggaggtatcctgctccagcagcttgctggtcaccttcctctcagcagcgaggacaataccatccttggctaagacaccaagggctgtgccagcgtgagaaatagcctcaagcgcatattcaacctggtagagtcgaccctctggggagaagatggtggtctttccaaaatcgtcataggttagctggagctgcacaagaggaatgacggtgtgcacaaaccctcgaatcgtatctccgagacatcgtgtatgaataaaagaaagcgaaaaaaactcaaaatgggctaaaggtgagggttgattgtgcgagacaggtggttcgggatggtgaaggtcgatggtgaagacgtagaagctccaggcaactcgccctggcgcgtcctctgtcatccgccaagctcggaccacttcaccacaccaaagcttcgttgcgacgatttcaccaccttgacccgcaagtacggattacaagaccgatttgcccattactttgcattttaaattgattcatatcgattgctatgctcagatcaacatacaccgctccacctcctttgccatcggggtggacacaacatcgagcccccacaggttggtcttgcgctgggttcgagtgaaaggtcttggttctgactattaagccaggtcatttgtactattacaattcttccacaaaacaatcgacatatacccggcctcaagaaacagctcctcagaccattcaggctgctccagacaccccagaagcaacatacaatccagagacgctacctccgttttcttcaacaccatatggaccaatagggtttgcctcggggccggcgcaatttagtccaccccagaactcccgcggccgcggaggattccgcggtggnnnnnnnnnnnnnnnnnnnnnnnnnnnnnnnnnnnnnnnnnnnnnnnnnnnnnnnnnnnnnnnnnnnnnnnnnnnnnnnnnnnnnnnnnnnnnnnnnnnnnnnnnnnnnnnnnnnnnnnnnnnnnnnnnnnnnnnnnnnnnnnnnnnnnnnnnnnnnnnnnnnnnnnnnnnnnnnnnnnnnnnnnnagccccccccggagcccccgcggccggggaggattccgcggtgggagaggttatcatgatcatggacggagagaaaccgaagatcgaccaagagcgaagcatcctattcccgactgcgccccgtggctactagtaaagaccaagcttgggaggagatttgtgcacaatccggaaacaaacgaaagtttttggaaatttccagagcaagttttgaagggtgtggttgaatttgatcgcctcgagcgtgagaaaaaggaaaggaaagaacggggtgagcccgaggtaccagccaaaaaggaaccgccttcaccacagcatggtcgtatagagcctgagccgataccgcaagaggcggaacgtgcagattatgactccgactatgaagaggtcgaggttacagacagcgagggagaagagggccaaccgtcgaagcgtgcacgagctgaaagtgagggtgtcaaggatcagccgctagagttcaacgaagaagacatggcatatcaactagcagccatgggtgaagattacggactagaccccggggaatatggcgaggtcggagaagaagattgggaagagggtgcagagggcctgccgctgaccgaagccgatgccgaggccctcttccgcgacttgctggatgacttccgaatcaatccattcacgacatgggagaatgtcatcgaagaaggccgcatcattgaagatacccggtataccgcaccctcgaacatgaagacacgacgagagatattttccaattggacccgggacagaatccaagatgtgagagagcagaaagcgaagcaggaaaagaccgacccgcgcattagatatctcgcatttttgcaagaacacgccactccaaagctttactggccagagttcaagcgcaagtacaggaaagagcctgaaatgaaggactctcagcttggagacaaagagcgcgagaagttctaccgggaccacatctcgcgtctcaagcagcccgaaagcactcgcaagtcagacttatcagccctgctcaaatctgttcccttggacttgttgcatcggtcatcgaacttggaagccctgccaaccattatcatcaccgatattcgttatatcggactcgcgcccgaggttcgaaatccgttgattgaggcatacatatctactctgcctccagcgccggaggtacagatgacggcagaagagttagaagaagtcgaccgaaaacgaattgaacgggagaaacgcgagagggctcttgcagatcgggagaagcgggtggaggaagagaaacggaggcagcgaggagatcttctccgtagcaagcatcttctccgagaaggcgaagccgagattgaacaggcaatgcatgtcaacaaggacggactaatgagctacatggacattgatcaggcagtagacgaggaacagaagccgagtcaataatagttggtcactgaatattacatatcacttttgtcgagataaggacagtcgtgttcatattgtacatcaagaggcaatttgattataccaatgccatccggttcctgagggtatcactgtagatgagggaaatcatttcccttcacgtaaacgattcatcattccaccatcgatccgatcatttaaatctccaatcatcccaatcctcgtcgtcatcgtcttcactctcgctctcaacctgctccactgcgccagatcctatcggctcatcttgtgtcttgtcttcggcgcgggatttccgcagctcctcgcgtttgtgtttgagccttcgcacccgctcttccagctgatccatctcatcaaactcttcctctaaaagccgtgcggcatcctctcgctccccttccatctctgcctcacgagtgcgggctgtcgacgtcttcgatctctcttgttgtgcagcgagttctgcagccgtcactggcgctgcggatattgtggcctcagctgtaagagcggctggtacatggggctcatcggactgggcggcgacctcgcgttcaaatgctgcccatgcctcttcgtcaataggcgtggatggatcttcgcgggggcgcgtagttggttcttctgcaaggtctgcagctgactcaacaacctcttgttcgttgtcgagtggaggttctgggccagcgacatcatcctcaacttgctccgaaccttcatcctctgtagtgtgctcaatgcttgctgcgccagaggcagactggaatgtatcttgttccgcagcgcgaagcttctttcgcattactccatctccactatcaaccttgcgctttttggtgacccggtttcctgtcgtatttggctgagatgtgcccttgcgggaagctaattcactgcggagtagggatcggacgtcggccatattcttcaatttgtaaggataagagatatgttatggtaggtgaaataagttcagaaacaaactggcggaaacagaagagcctgtgatgaagagtggggaatctggagaagctcaatcttaagattcaccgaagggcatttcgccgcgaacctgtggctggtgacaaatagcacgtgatgacgcatccagtgaatgacaaagacgggagccaagccacttattcatctctcttcttctcctcacatcgcatcggatctcttttctatctaacatctttcaaccatcctttggcgttattgctttcgccacttgatcttcgagcatttctgctccaatctcaactcaaaccgtctagccctatttttgactgcaaagtgcgtgatttgggctcaaatcactccacgcgaccccgcttagcgccaagtgtcgatttgacgcgcagcaagggattgcacagtccaccataacacctgcttgagcgcgttctttgtcaccgcgcgtcaatccaagaaatattgcgcagagactagatcggttcttttattcgatcgagcaaaagtgtgggctagacagtgacgctgttgtgctgtcttcttgtgtattacattagcgccttgagctcgtagagacttttgtcagcctggggtaacacctgaatttcgagcaagtgaagagacctatttcctgccacgcgctgtagtacgcgcgtcaaatcaccattatcatggccggtaagctttcgtacaccaccactacacacattgctatccgatcacttttgagtggcagggcaaccccaggtctgggttgcgactatttaccagaagacaagctaacagtgagattagatgaaccccgacgctccggccgagccaccaaaggccaacacaagaaccttgaactgccagatgatcacgcaaaaaaaggcaaaagcaaaagcccgaaagaaaagagcgccaagttgtccgccgaacccacacccggtcctagcgaagctgggggagacgaagaagagattatccgatgtatctgtggtgaatatgaagaggaagaggatgtggagcgtgatatgatttgctgtgatcaatgctcagcatggcaacacaatgactgcatgggtctcacattcgtgaaaggtcaagaaccagatcaatactactgcgaacaatgtcgaccagagaatcacacaaccctcttggccaagatcaacgcgggcgagaaaccctgggaagagcttgccgagaaacgtcgccaagaggccgaggagaagaagtccaaacggaaaaagggcaagaaaggaggccgcaaaggaagacccagtgagagccggacggatgccagcacaccagctcgcactgcgccatccactacaccaggccctagcggttctcctgcacccgctgtgtccgccgtgcctgcctcagccgaaccggagaaaaatggccatgctgttgattctcggcgatccagcactaacaagcgcaaacttgatgaggcaatggaggcagaaaacgtaaatacccccatcccacccaatcatcacattcaaaatgttaacttgcttatttatcagggaccacaggtgaaacagcaacgggtatccccacagtctacaccggcagctatcccagaggcaacggcaacccgaatcaagacagacactatccccgaggcgcgtgccattggagccctggaggagttgatgcctgcccgcaagagtgtggccgcacacctcatcaagttgtttgtagaccagattactgcggcactgaaagctggttcttttaccttgcatgcgaaccagtcagtggaggacatggcacagcaactggctctatccattgaggatgccacgtatgagagtatctgcggacggtcaggcgagccgaatgaatcatataaggcgcaattacggtcgatcatattcaatgtaaagaagaatacttctctgcgagatcgtctgctcataggtagtctgtcccctaagttgctgtctcagatgacatcggcggagatggctagcgaagaactgcagcagaaggacgctgagatcaagcgagaagcggacagacatcacaccattattcaggaacaaggccctcggattcgacgcactcataaaggagaagagttgatcgaggatgaacaccatggcgcgaacgagtctattttctcccgcggaccccgtcgcgctgtgggggatgacggcagtccaacccacaaaagccctaccagccccatggggccacatcgatcaaagacagagatagatggatacgttcgtggtctatcacccgagggtgctcaccatgaccacgtcttccctgaagtggctcccgccatctacgagccagtgcctagtggcagggtccaagcagatgctgagatcgatcagctcttgcgcgacgatgaaccctattcacctccttattcgcctaaagacttcgacgacgacggcaccatctggcgcggtaaagtaacgatgcctccaatcggggagttctcctcgtccgcgaagcatgtgggaggcgcggacttgagtggccgaatcccatggagtcaactggcgcccgccaccttggttgttgatggtcgtatcgatatcagacgagcaactgactatctatgtggccttcagttcagcaagtctaccgatgtgtctgtgatagcaattagcagtcctgatcagcccacggatcgagcaggcttcgacaaaatgtttgactacttccatagtcgtggccgttatggcgtcattggaaagcatccgctgtccgctgttaaagacacctacattgtcccaatggagatcggcaccacaacgatgcccgagttcattgagctgctggaaaacatctcactggaagtccccattactcaacgcatacttcttaccattttcgttgtcaagaccggcgaatccaacccttcatctgtccagccgccatcccaccaggctagccaagagccacctgtctctgggagcccctcagtcgcggcgactcctcagcagcctcagttcagcgctggaactgcaccaactcctccctcccacttcggtggcttcaactcgaatcccgcaacgtacgtccagcaggcccctgcacagcaaggccagctcacccctcaacaccagcctgctctaaccggcctccccgccgcggtgcaagtcctcggctcacaagttgatgcccccgccatccaacaacttctcaagactgcgcctaacgtggacatggcgcagcttagtgtcgttcgcgacattctggctcgccaacctgctgccgctgctcattacgatactttgatgcaggctctatttgagacccaagcaaacggccatgtgcctcagcagggtgtgtaatagagctattcatttccatgatagccatttttttcctgtacagtttatcccattttgtatttccttttacaaggctgcgcaatgctagtcaggtgttcaggtgaaatctccagggctgggaaacgggtttgttttaggaaagtggaatacccaccgccaaatgttttcgaattttatgctggttctttactcgcaaaaatggaaccgattctagttagtatcttatacggcttgtttagccctgggtttattgtaggcagattgtaatcatgcactggtaaagttctgcatttgtagtcactaggttccattctatcactagtgatatgtattatttctctattatgacacagattgagatattccatcctatcaggtggaaagataatatattatacacgatttcttgtacatctttcagtgttgtgagatatcgacaagaagcagaagaatgaaaaatgaaatggatattgagcacttatcctatgacctccctaaccgtcgtttgagcatcatacacgagataataagtaaaaacgcctgcgctatgcaacgggtccccaagctttcaagaacgacgtgaagtcaacgaaaatcaccatccttcaccatctttcaccatcttccacctccgcggcgccgatatccaccgccgccgccaccaccaccaccgccatatcgaggaccccgaccagcaccgggacgaccgccagaggtgtaagggttatcatcttcttcatgatgacgaattggtggagcccggcctttcagctcgatgctcagcttcttgcagttcttgcgcatgtctgagtaccccatgtgcatttttccgaaaaagtgatccgccagccggcggtcgttgtcaagacgagacaagtaagctccgcaaacgtcacatacttgtagcttctggtggccggatggcccagaggtatcttgaaggttcttgagatcgcgctccagactctccttctggtgcttggaggtgcggactttgtgcatttcactgagtgctagtgcgacagagcctgtttcgccgagaatcgagacttcttggagaccggagttgatggtgttggaaaggtcggcaatttgtttaagctatataagaagttagtgaactccaacggagtccatctgattggagattgaagattgaagtaaatttatacataccaggtcgttcgtctgccgaatctcatccggcgtcttttccagtcggcgctgcgcagtgtcgattcggcggtcacagtcgtcaatgtacttctgcatgtcgcgcaagtaatcgaattcgaacccccatttcgccttctctgacgcagacgcagtgtcatattctgtcttcaagccttcactatggaccttggggcaaattccgagatcttgcttggtgtttgtgaacaggtcgtgcgggcaggtgccaacaatgtaagaacggcaaactttgctgtctgtgattgcgagctgggaattgcgaccctgtgtgccagttccagtgagctgatcagctatagacagaagcaatgttagctcaacttaaagagacttgttgggggtggccagagctcggaaattttgagagtcacaaaaggagcaacatacctcccatgagctgctcaagcagctttctctgttctgctgccatgctgacggtgtctgcactaagctggaaaggaaatgaaagacgaaattgtgtcaacgggctgattggcggcaaacgacgaagtcttttgctttggatgcttttggcgccaaggaaggcggtgaggctccgctgtcaacagcatctcggggattttggagtttggcttcgatctttctttcgatgtggagcttttatattgacttggcgattactgaggtctgattttctggggccatagtcaattaggctcatcgcttcaccgagaccccctgccaattgaccagtgacaaccgcatggacgaagaccgagctccggcaagcatgaagtcatgacggtcctttcactattctcacttccttttgtcgcgcttattctctcattatggagctcctctgcctttgcgtcatcggactatcatgagcacctcctccttcaacctctcccgcagtcctccttgctagcttcttttaacttccgaagtaatacgtcgcaacaatcattcgaccaacagcattttagatatttgcctcgcgcgcttggtcagattctccaacacgcccacacaaaagaattacacctccgcttcaccaccggcagatgggacgctgaaagctggggcacacgaccatggaacggcagtaaagaaggaggcactggcgtcgagctttgggcgtggattgatgcgccggatgatgaagagtatgctcctcactcgaaatatgttataaaagacacacaatgctgattgactagggcttttgccaaatggatcactctgacacagtccctctctggtctattctgcgcctcactgaacttcgtggactcgacccggaccactcgacctgttgtttcttttgaaccggctggggatcactcagctgctgatcagctgcaccttttgcatggaacgcttcctggagaggtagtttgcacagagaatttgactcctttcttgaagctgcttccttgcaaaggcaaggctggaatctcttcactatttgatgggcacaaactgttcgatgccgcgtggcagagtatgtccgtcgatatccagccagtctgttctgcagatggagaatgtgtggttcagatcgagcaaaccgtggacatggtcttggatattgatcgctccaagcgctctcgttgtgcgtacttttcaccggcatactctgcctcaagattgctaacatggatctagcgaacccaattcctcggcctgtgcctaatgagcagctggtttgcgacacttccaagccctataattcggatgatacctgctatccggtggagaagacaagcgagaaggcatggagtcttgcggaaatttttgggcgaagcctaaatggtgtttgtcctctcacagatttcgatgggtctagcgaccagagtgtctgccttcgagtgccccacgaacggggtgtcttcatatccgaggaggccaatgaaatcaagaaagatgatggctttacacgctgtttcaaattggcgccctcggttccctttgatctttcgatcccgcagcagccagccaacactgaagttccattggacgagcctgttttgcatgcggagcgaactatcgttggccacggccaggagcgcggtggaatgcgcattatctttggcaatccatccaacaccagcgcagttgactttatctacttcgaatctcttccgtggttcctgcgaccatatatacacactttgcatgcaacaatcacaggacacgatggagtcttgcgtgaggtcccagcctctgaaatcgtcaaagaaacgtactaccggcctgctattgatcgcgagcgcggaacacaattagaactggcgctgtcagtccccgcagcatcaactgtcacgctgacttacgatttcgagaaggccattcttcggtacaccgagtacccgcctgatgctaatcgagggttcaacgttgcacctgcggtaattcggatcttggatacggcccataatgtgccgatctacattcgttcaacaagtctgctgcttcaacttccaaccccggatttcagcatgccgtacaatgtgatcattcttactagtactgttattgcacttgcttttggaactatcttcaacatcctggttcgacgagttgtctctctagatgaggctgccgctctcggagcccagaccctcaaaggccggatactggggaaattggtggccattcgtgatcgactccgcggcaaggataccaaaatggattagttcttatttgaataagtaatcacaattacaataattagcgggtttaaggccccttaaaagacctgtaaaacgcctagcattagttatatattgcttttcttcacagaacctgaagacctgtggtattgaggccggaaattcccgctgtcactaactttacaatcgatgcacctaggaggttgttcatacaaaactgcctctgacctcattattcgaaatctgatagtacatattaacgcaacacatggccacttggtcacttggttggaccggctcgaccaatgcttgagccagacgcgaatgcttgttggacatgctcttccaaatgcaacacactatcaactcctttccaaaatatggagtcaatccgcagaaggccaagatggaggcaaggcaaaacgtcagccttcaggcgcatatcccggcgcactttgttcagacaagtgacccatttgtctgcctcgttcctatcaatggaggtggcagccatattcagaatttggaaacagatggacgagaatgcagtcgcactccaggccggccataaaacctcgaagtcttccggacgcagctcgtgaatgaactccgctgctgccaaaatgcaggtttctgtccggatccgagcctgctcacgcgccattatatattcggcctcattcaaattttcaacggttggctgcagaaacggcctcaaaatagccctggaaatactcagatgaatataatggtagttcatctcgagtgttctttctagtccgattggtctgccttgattcaatgatctgacatcggtcgatggtacagatactggtctatgccaagagaagagactttcaagcagtggaccggttaatgcgacggtcttgtggttatcagtacacatggtattaatggcacgaggagaactaatattagtgagttgcggaaaacggcgagacagtggacaacggacacggggattgtcttactataattgcgctagaacacgatcaagtattgcgtcgagttccgctcgcttcatgatattcatccaggctagagggtcaagtccactgtcaggttgatcctcttgactaagacttgtcacgagccagttatcatgatgcagtaaaggtggccgaccaaggctcaacgcaagccatttgtctgtcgaataaatgaaatacgacaaacgacgtcgctgcgcaatttgccatggaggtattcgccatgactttggatctaaatgtagtccaagggtatgagcgcaagcaacaagggtggcgagctgggaccatctgaagccactatccaatacaattgggtttggataaggtcgaatggccaaaagaagcattgtctgcacaacacaaagcttcggtgcgtggatctcatatggaagcgctttgttgataatctcgtatagtgccacacctgatggcttatcatacgcgagatcaatgcatagtctttcgtcaaatttagtgaagggctcgactattaggtatacactcgcaaggaggtatggcgggctggtgttggggtttaattggcctggtaaaccaagtatcgggtaatccggtgcgatgattctctcaaataagttaataagtctgagaccgatatctgctgggaccaaagactcgagttcctgcctcaattcaagggtcgaaacgttctcgcatccgttttcttctctgctggcagcaaatattgagggatttgacagtaaaaattgagttggctcgggtcctgaagacacagagtgaatactgagatttttgaaatgagaagccccagatgtgtcgtatcgataacgaccaatcagaaaagggtccatatcaccactactgccgagcaattgtggtgtgattataccctgcgtatcaaggcaaatagatgagccattctcctgcataagcaatggaaggcagtttgcattcgatgaagctccaacttccgaatggccagtccctggaagcccaggtgatggataaataaagctccctggactaaatccagtcggccatgtgccatctccaaagtcacccgataacgatactccagctccattaaagaaatcatgaaacccttcaggtgcagcagcaaccgaatgatttaccccatgatcatcaatcgacatcaagatatcgtagtggactgagtcaccaactggtgaaactgcacgcagatctgagtgtgggcttatctcagtttgctgggtcatctgtgagctaatcgcttcggagaaaggctggcgtggccttgaggtcggttgtagaaacgtgcattctttcccatgaagtgtacaaagataacagggaggtgctcgatcaatgcgacaagctgccttcctagagcgacaggaatcacaagcgcggttccgcttactcatgtacctacgagctctgcctgacatcctttcattgagaaagttgtcatgagcacatagtagattagtggctaaacgagggtttaagagatacgatgtccacacagtcaaatcttagccccacattccacgtgactatatctgggttccaaggttcttgtattaatgtgatttattatcactaaaggtctattcgagtttccatataaatatgattatgctgaataaaaatcttgcactaatactttcaaatctccacactttgcttgtgctctttttaactatcggtacaactattctcggagtcagcttcccgggtctagtcccctgcgaaatattgagttgggtggacaaccttcagccgatgtctgttagacccatcattgggttttcttccactttctaagctcaggcttttgttcttgccccgtaagcgcatgcttcacagtgccaactccccaaggcaggatctcggccgagaaaccgcaggaataaaccctatgcctccgacaaccaagattatgaccacccagtcccttagtacgactacaggaatggattcatgatacgtaggcagaaatatagtagggctgagcaagtttgaagtttcagttttcgtgtggtatgtatgagtcagtcgctgggcacaattcggcgtcctattcttgatgcttgacttgtggtccaagctaacagctgagcaatttaagttgtattattgctaatttgagctctcattataactaaatcaatacccagctcatgcctaattaaatagttaggctgcggttgtgattactagtagttacgtaactaacacgaaatgaaattttaagttatcgtgccgataaccttgtccccgcattgcccgggccgacctcgggaagtaaaagttaaggttgtgataacattcttttattgatatcagtttgcatggagcttagaatttaggggaggaaagaatcgggactttctagaaaaagtcggtatatcctataggcaaaatcatgcaaaaaaaaaaaaaaagagaaaaagaaagatttattagaccaatatatcagggcatcatgctcagtttaagggaacttagagcttgagcaaaataattttttatgtctagttttggcacatactccccagtactattcactcttgccgtagtgcacttgccgaagcatctgactagtgtcttcgatatacacaaagctttgtgagagccccctttcggggtgattgaagtgcccgaatgcatgtggcacgccggggtatctcttcattgtgacatcatttccagcctcttgcataagctgaccatagtactctccttcatcacgctcaagatcaaattctgctgtgatgatgtgtgcttttgcaaggcctttgaatgaaggagcaaggacaggcgtgcatatccactcttttgtcaagattttttcttgggtagctagaaacgaatgagtaaatgtaggaagagggttacaagcgtggaatagagaaagaagacttaccgtcatcgtcgccaagccaatacttcaggaaccattgctctctgcctaatggtccccaaggagaatcatggaatagcaagacacttttgtagggacaagtagactcattcagctcgcgtgttcttagacagtagcgcatatctgtcgccggaactatcattaactgaagttttagctcaatgccctcgtcacgggcgaaatgcgccatcactgcagtcatttgacctccagccgagagacctccgatagaaacactcgagggatcaacattgagcttagaggcattggttattgtctgtccatatatcgtgttagcaaagcaaacatcaaatgatattgtttttgtatttacccatttcacagcatcccatgagtcgtagatgctggtaggatatggaaattccggagccagtcggtagtctacatcaatcactttaatttgcgctttgttgcacatgtgccggcaccaagcagcttcagacttgagattgccaaggacccatccccctggagccaatgaacaacggttagcaaatccacgttagagagcgtaagggtggtatcgtaaattgcgtacctccatggaagttcaaatgaacggggaatggaccagatccttttggcgtatataccctgatcatgatctttccagctggttgagagactgggatctctatgtcctcaacacggaaaacggacggaccttgatcatagtaagtgcttgtttagacgatttaatcaagactctgtcttaccagggcatgttgggtaggtgaagctatacgtggcgggacttttgcgatattcctcaagagatagctcgtcggctctcaccatggagctgccgtgcttttcccatagttctacccattcaggatccaatccacccaagagcttgtctggtatagacaagcgccccttcgtcccttctaccacgaccgatgtctgtgtacctaccacgactgaggtttgtgtactagccattgcgatagggaggttggcaataaagagaaattatgaaggccaaaagatggtaaatggtcaattttaagtgaacgactaaaatgaattaagagatatttgacggtgttgataaatttagtcacttacccttcgatatgccttggatataatgccgggctctggttggcggcatcggccgtattgtcagctccgatctaagcgataggcatcggggtgggggcattcctatctgcgggtccaatgtgggccgtacaccccggattcgttcccgatatcgatccttccactgaccgagttggttaaattgaaacgccgttcctctgatttggcatagggtagagaagagttaatattttgtctcttacacattgcttcacatactgttctaaatatttacattgttcagccgatatggactctgtctcagtcgataaccgaagagactattcagaggaactggacaaagttgaccagtcacctactagtctccatgctggactccgccgtgttcctgacaaattcccacgtgtcgcactattaatccttgtcgtcgaggtaagttgctccaccgcccacgtgttgattgccctagctcgcccgctaacatggacatactagcttggcgaacggttcacttattttggcctcagcggtcctatgcaaaattatatcaagtatgctgtcttttacaaatgagttgatcttttgaaaacaatatctaactccgtttttatctagtaacccctatgatcctggttcagatctccctggcgcactaggcaaaggacaagcaaccgcatcggctcttggaaacttctttaaattttgggcttatgcctccaccattattggcgcgattgttgcaggtaatacatctccccttgagagattgcatcattgttattaatagtccaccagaccaatacgtcggcaaattcaaagccatcacaatctctttgggaatctacatagtcgggttgatcatcttggttgcaaccgcgacaccagctggctttaagagcgatgctggttttggaggcttggttgctgcgatggtcatcattggcctaggaacaggtggaatcaaggccaatgtgactcccatgtgcgcggagcaataccaaaatgtagagccggtgttaaggatactcaaatcaggcgaacgtgtggttgttgatcccgaaatgaccgtgcagcgacttttcatgtggttctactgggttgtcaatgttggcgccctctcccccttgattacagtcaatgttgaggcgaagagctctttctggcttgcatatttgatcccactgatgtaagttgggataagacatatttgtattacacacctgctaatttcctccagtgcaattgttctctcggctatcgtcttcttgtccggccagaaacgatatgttaagattcctcctcaggggtctgctattattgatgcatgcaaggtcttgaacattgctcgacaggagaagaattttgaaaacgcgaagccatcagcactagaggcctcaggacatttgagcaagtatccatttgcatcttcaccgcactacacggatcagtacgtctcagacgtccgtcgaggctttagaagctgcagagtaagttgggatctgatacctcaatactgagttatgcttacacatagtatagatgtttatattcttcccattctattttgtttgctgggtccagatttggaacaatcttatctcgcaagctggacaaatggcgttgcatggaacgccgaacgatctcctgcaaaaccttgacccgatcgccttgtgtatcttcatcccacttcttgactgtgagtattgaatgatgataccgaaataacatccgctaaccaatatatctctagtgggcgtctatccagtctttcgcaagtttaagatcaacttcagcccagtccgtcgaatcttcgccggtttccttcttgtctcaatctccatggtctacgccagtgtgctacagcattacatttataagtccccagcaaacagcatacacgtgtggattcaagccccagcatatatcttggtcgcattctccgaggcctttgttattgttactggattggagcttgccttcacccatgctccgaaaacgtgagtcaactgcccacatagtactatcctactcaaactaaccacaacttatttcagccttcgatcttttatctctgcacttttctggctcatgatcggcattgcggcggcgatctgcatcggtctaagcccagtgtcgcaagatccgtatcttccttggatgtatggatctcttgcaattgtgggcttcgtggcgggatgtgcgttttatctttgcttcaggaagagtgactctcttgatccagtagacccaggattcgtcgaaggagttccagttgaaggaaacgggcagcatgttatacagattgctgactatggcaaacacagtgaagcatagaagttgtctgttcaattaaatagcctatataatcaatctacttccgactattattctaacagccgttttccttacatcacacgttcaagtagatgtttgattcctccagattttagcatctataagcctccgttcattccttcgtccactacttatgtcttcctttttatacactcatctcgacaagttgcaaataataccaacagactgaaatatatactatacgtacagcctagcatttggatcaacattgaacttttctttattcaagttcaatttaatcaattcgataatctagagattgccctaaatacaatcgtggcacttgtggcaagcccagaatttgcgagataggtatatactactcttggtatccaccttccccagtgccatgcctctatcatttcaattcagccgaacttagaatcacgggcgccaatcacaagctatgccgcctatccccacagtttaatgccgccaatcggagcagcccccaatctttcgcctccgagataggcgcttgtttactcgttaacctcatctaaattgaaatcgggattctagacacgagataaccaatatgaaatccaatgagtcaaagtgaagggctcatcagaaattaagaagttcttgttggtgttcagagttaccaggcacgatcgaggtggttgttctaatatcacaagaattatttatatattacatctttacactcttgagacggtttgccagagtgagctactaatagcatagaaatttagaggtgacagtatacttagtagatatatacattccttcatatccctgggagagataatccattggaccatcttatcccctgtgaaacagattgatttggccaggaattatcatgtaaatctgtcaagaaacaaggaaactcacttgccaaaaatgttcttaactgtactccatccaggataagtatcaggggcaccggccttatggttcatgaaactatggtcttcggtaacacaagttggctctccttcggcattcataggtagggcattggactcaagcatgttctcacgctcgataaacttattttgcgcttgcgtcttctgatcactcaaagaaaggaagtcacccattgttgatttgggattgatagcctgtggtatgagagttagggttagttagcatattctgtgaagctgtcccgacaacactcgaccacgtacatctgaatggcccaatccctcattcttgccacctaaccagagcctgtcgccccatccttgtccacctccgacattgttggcgggagtgggctcggcactgctgccaccggcgaccgcagtcgtttggtggttgggggtactatcgctgcccattttgatattgtgaatattctgacctgcatatgaggtcattagcgtaatagatcttagcgagaagcgattcaaacgaagtgataaaataatgagagaagtggatggtataagtcggcgttgtatctggaagtttgtaaactcacgatgtatatgttaaggaaattcggttcaattgtggcttcaatccttgtgattgaaattgtttagctggtggatttgagatgaagttgaatttgtttacttggatttatatacgttccatagccttgacctaatcctcgccacaaccccgcatgaagtcatgatgagtacatatcactctctgtgattggtttaccattgaagtaactacgtatatcgaatacttacatattgtcaaacttgctttcccaaatgctttagtttgccaggtattcttcgcccctttgtttcttagtaccttagaagctgtatatatagatgacttatggcagtattagtgcccgaacctcgatattctcatcaattactttctagttcctttccatgtgtatatggtacatgcatggcatataaataagtgggttctagcatgtattcactgacatttaacgaagaagttataaacattgttggcgcttgaggaaaccagccgtggaagaagctctcccgatgtccacgttataggtttcggaactatatatgaacaacctgcttcatgtttgtcttctctttctctttcctattctcatgattcttactgatgacattatcctttagggagatttgatataatcatctcactacgcatgttcaaacgattaaactattgaactattgaactattgacgatgcgatacctcggttgacaggagatagcctactcgtgttgctttttgtcaaagtatacttggaaggagaacgggccaatcttcatggcgagagccaatacccgcctcatggaaagaagattgtctccaatctgctattccaatccgagaacacctatatcctatcttgtcttgatatgaatacccgggacaatcttttttggaataccgccgcggtcggcaacagaagagtggaaatcgtggacattctactcagaaatcaagggagaaggatctcagggcgttccattcctagtacacacgagccaatcgtgcagttgcttctgtggaatagcgagacctaaatgaagcacacctggaagccgacacaggcctttgggggactaccggcgactaagtatcccactggggcataaccctctcattagtgagaggtgacaattctttttgggaattgtccccctcgaccctgcctgaaatgtcagtaccgccttcctaatcgggtacctcttagaattttgctacagatgtttaaccaaattaggaaggcggtactgaaaatggagtagaggggtaaagaattagccgcagaatatactactgatgtggctagcggatctattaatctattattttggacttgaatcattttatttaacttatatgaatttagaaagccaatgttgccctccagttttcagtgggttgctcattttttgcgaggatgctccagatcataccgaaccaccctgaaagttggccaaacctgcaacaagacagcgccaaccatcatacaacccgcaaagacctgagcatgcaggaactccgaggtatcgagattgaccaaagcacctgcaattggagttccagcaagcgccccgaaagacgatatcccccacatcatgcccaaacgagtccccaagaagcttgaatccggacagaaaatcggatgtgccacaatggaagtcggcgccgtgaccaaaacaccactgagagctccccagtagcatgcccagacaataaacccagccatactggtagccgcaatccaagtgaacatagcaatcgccgacgcgatcacggagaatatcagtatcccaataggttttatatatgcgacaagcagatatggaacgacgcgaccgatgacggacgtgccattgacaatagcaaccatataaaagctaaaatcggtagtggtatgcaccaccgtgcgggcataggaggcgatgtagaaaattggcacgtagtatgcgagcatgacacacgtgagcgagagcgagaacatcataaatgagggctcacggaaggcactccagtcgataagacttcttgcatgtgctctctggcctggttgccgacacaaaatcagacatgctacaacagcaagaaataggctgatgaagccaatgctgcgaactgcccatgcgaatccgactctgggctgcagttggcggaacatgactgggaaaatgacggcccccacgctagacccaattgatgcgcagccgatggcgattgggcgttttgtggtgaaactcgttgatattacgacgagggctgggatgtaggagataccgcctcccattccgacgcagaatccttgcgcgagtagtacctattcttgtcagaaatggttcttccaatgtcagatttcggatgtacctgatagtacgaagtggcgagactggtcatcatcattccgaatacagtcaagaaacttccggatataattagaggacgcaagtatccgatatcaactaatggccccgtagcaagaccaaccattgggattagcgtggcctggatactgcctacccatgagatcgtggatggtgtctcatttggcagaagttctgtttggtaatactcttggaaagagccataggtcgtcagtaggcccctggagacaatattagcttgatacaagcacagtaagtgtgacaacagtgtaaaccaaccaagagttcacaaagacacagaagcccgcaagaacatttaaccatgcatcaaggcccccattgactctttttttcggttgttcgttttcacgttcattgtcaagtgccaagttgtccgatggtaaatgtggttgggcgccatgtgtcttctttgttgaacgcatttcgatatatgtgtgccattatgtatcaaaggaaaacagctatgaccttacagttataaggaagaagaacccttttccctccagcactccactgtggggaaaccggggtttccattagtcaacttcttcgagcggcactgggtagccgagctctaccgatttggttggctgttatgggtttttttatgtgctcgtcggggacctccgaatttctgatcttcccgacatctacggagtatgttgtacttaaccgcactgaatattacttccgcttccggaatatatatcgcctttctctagggctccatgatctaactttgtgcctctattattctctcgcaggactttcttctcggacaatttcttggctgcatgctcctatagtgtcagttgacgcgagactagaccaatcacatccacatccggggtaaaagcctcctacacattggcaatcttcgttctatatgagcaatcgagatcaactatgattcaatcgaaccctttttgtcgtctttgaccttatgaattatgtcactaattttacatcgcatttgccgaatgattcaacgcacaatcacgtcgctcaatgcgctatgtgactttatgctaacccttaaggatttccgttgatgtactccgtgaccgttatatcaccccgatctggagagacattggctattcatggttgtgatccattgctcaatcacgtcagagcacgccgcccctatagccatctgctaacccccaaagagccacctcttgtcgcaagacggcggtctccctgtccctctccagattgtgcattgctggagatccccgtttgtttgaggaagtgttattctgctcggtcttactacagtcccgaggtgatccctatatcgggcctccttcacaccgaattgtgccttctgtacccgcctattaacaccaatatgtattatccgcctaagcctaatacactacacatcatagagcttgggaaatggctagcccgctgaagaatggatgtggcgagttggatcttactagaaaaggcaatcaatggtgcgtgaagtatgggcaggcctttctgatgatctggagggagaaattccaattatttagacttattccgcgttatttcgaccagtctcagagtcttgccctagcaagcactccattttattgaaatacctcaaggatagaggcaacataagcggccaatgatacttgttgtaaaattagaagaaagcaatgattcaacaatgtcatattccagaaagcagcgttcgctatgagcgtcgatataagtatatgtaatgctggacttttgcatctgacccatctgagccaccaatcaaggcttcaggacaggcgggatatcaaattgcaagtgatggaaaaaggagtcttttcatgtcgtgaatacagaaagaaaatcgtaatagccaatgagaaccaaaacaaaacaaagtcatcttctaatgaggttactcatcctcaaactggtctgcccatgttccagtgatgggtgaaaacgaagattccaatttttccattgctgactgtgacttggatggtgcaggagcagtttcgagctggactttagtctcagccttaagcttgttctccggcgcaggcgcagctttggtctcagtcttcttgggtccttcaggcagagccgggaatgcactctcatccaacctcggtgcagcagggctctctgttgcatatatactgtcagctaagcccttgcgtggccggtctccctgtagggcacgggaagatccacggtcacggccacctcgaccacctcgtccacctcgtccacgaccccggttgtcactagaatgatctgcaacatcttctgaacggccgtcttcaaagtctcgtcgcacggcgccagacacaccgccatgcataccgcgtcggaattggctgcctccaccgcgggggtcataatcttcctcgcgtttctgcgagtcccactcacgccctgtctgggccttgagtttacgctgtctgtttttctcacgttcactatccataacgcggcggtgcgcgagttcctcacgacgtttcttcgccgcctcctgctcgcgctccatgaacgacgcctgatcagcttcggcgcgagcatgggctgcagccttcttcacagcgttctccttggctgcagcaatgcgtttagatagttcctcctctgtgagtttaggctggaagtaaacagtcagcaaggtactcttggtaagagcgggaaggactgcatacttttctcagaccaccagtggcactccgatcaccacggacagctggcacacgctgggcctcttcaccaccctcttcgaccggaccggtctgctctttaggctcagcgggcttctcatgcctggaagcactagcctcacgcacatcggcagcaggcgcattggcaggagcctttttgcgcggtgtgctttctgaccgtttttgctctgactcccttccaccgcgtcctcctttgccccgactccgtcgtccccggcctcgttcaccgccacggccccgctgcggagtttccccacgtggaattggttgctcgggagcttgcttctcgggtacatgtgcctcctgtgactctggctctgcctcggcggtaatggcctctgtgtgcgcctgctgctcttctgtggagattgggataatctcgtcgtcgaataggtcgtcagcgccgcgagtttgtgcgaactcgtccatctcggggtctgccattgcgattgggtctggataagtgcactggaaggttggaaaagtcgcgggtgggctgtgaactcgaaactcgcggaattgttgccgctatatacgcgattcgaggggtagctgcgatggaggggctcagatgatggtctgtgtgcaggctagtggagggtgtaatatattgtcgtctttcaaaatttgcaataattcatataaaaagcatatgtaacggagaaacgaatagcagggattacagtggtcacacagctcaactgatctgcaatccagctggggcagtctgctaggcggtctgctattgctgcggagcacattgttttgccgatgaactccgtctgctttctgccgatataagtcgtgcctgcgcttgtttgtactcgacctgttttgacatgctgcaactaggccgatttacctgtcaagggtaagttggtcacttcccggccccaaactcgacaagtcgaattagacatttggaatgtccatctcctcaagtcagagggggaagaaatccggggttctccacaaatgcggagaaaccccctgcttcactccaaggctgttggaatcggcacttctgattgcttgtatttcgtgatgtacgtagttgctcattcaaggcgctatctcagctcctattccttgagatatccgcgtagagacttcatcatagtttgtagatttctcacattggcgtgagtgagagatccttggtcaacggtgacctggctcattcaagggtatagacactgttttgctttttcttcttgaaaatccacgggtatttactgcacaaagctgtctgtcttcggtggggggagctccataaacaaggccaaatttacagcggagttctatattgctactaggtacatgcacagttgctggggaatcccgttgagtaatcgagtctcaagggttattggaactatcttaagtccccatcattgtgacgcaaaggctgttggcaaaacatagaagaaactgggtacatgtaggttgtagcatgagcacagaatttaatctcggtcaactatcaaccaatcagacaggatagtcaatcgctagttaaggactatgatcatcagtatcaagcagggtacctggactactaggtatacacacacttactgccattgcttgagcgtcttctcaaggtctcccagcctatcaatctgctttatatgaatcacactgagagaatctcggtccttcgataaaacagtggacttctgtcgtatcccacgtatcttatctagcaacctttctgtctcgtcatgcgcagccttggcttgttctgaggttggcgtgtctcgtagaatcttgtacagccgattttgccacgccggtaattctgcctcttccgcacccatctgctcttcgagtccagatgattactttattctgatatgtctcgatatcctttctcagggcattggtggttcggacgatcatccatgcatggaacttggtaacgaagtgttgaatcaatccacgctgctgctaacgagataagagagattcctgccatcggaaacacaacaaataaaatgagcccgttcatgatgtagagtttggagcattgtaaatgagtcagtcaaaaagtgagaacatttggaagttggagagtggtaataactataaaactttgaatctaattggctacttcctcttatacttcttagacatctcgagccaagatctcaatatctggatcatcgctgaagtatcgtcaatgccataaagaagtataacagtggtattttgatgttaatctagtgggtatatgatttcctttatatcgaaagaaatatgcagccagtcaaccgctagggactagaggggtcatgttccttttgattagggttagaaaacttattactatcactttctttacttcttcaatagcagccgagtcttaaattagcggagcgctacactgtgtgaagcaaccaataagatacccgcgatagccgctatagaaggccccacatctccgcagtcccttcggatattgcgccgagtctccgatcacatcattggcaatctctctgttcgaaaaacttcagttcgctctggaaatcacatcatgtctgcgggtgacactgccagagagcctgcgtctgagcaaacaccgctccttcgtgattcacccaatagcgatgccaatgagaataccccactacaccaggaacccagtaccaaggagctgatttggatcctcggaagcatttggctcggtgtcttcctagctgctctcggtatggacttcaactttttcaggagtatcataatgactgactttggctcattgcagatacaacaatcgttgccacgctttccgcgcctatctcttcgtccttcaactcattctcgttgctctcgtggctagccacttcttatttgatctccaatgccgcctgccagcctctcagtggccgattgactgatatttactctcgtcggtgggggcttgtgttctctaacgtcttcttcgcccttggcaacttgatctgcggcctggcaagagcacaatgggttatcattttcggtcgcgtcgtagcaggtgtcggaggaggcggtcttactgcgatctcgaccttcgtcacttctgacctagtccctctccgtaagcgaggcatatggcagggcattggaaacatctgctacggtgctggtatgggacttggaggtgtgtttggcgggtggatcaacgatactctgggatggagatgggcgtttttgcttcaggttcccttcctgatcatctcatgcatcttagtggcggttaaagtcaagattcccgtgaaggagtcggataccgcgcgcatcaaacgcgttgacttcctcggcgctatcactctagttctgacattggtcacattattgcttggcctcaacacgggcggaaaccaagtaccgtggacccacccactggtactgacatcgctggttgcctccgctgtcttcctgggtctgttcatctatgtggaagctgtggttgcttctgagcctgtcattcccgtgcgccttttgctgaaccgcaccgtggcagctgcttgtctgaccaactggttcggtaccatggccatcttcggcctcctcttttatctaccggtgtacttccaggtgcagggactttccccgactgctgcgggtgcgcgattaattccgcaggcggtcggcacctcgatcggctctttggggtcgggtatcatcatgcgcgccagcggtcgatatgcatctcttaattatgttgccatggctgtccaggttctctccgctgggctcatctgcactttgaatctccacacgcctgtgggattgccgttcctctatttcttcctaggcggagcatcctatggtagcatgctaaccatcaccctggtggcgctcatctctgctgtagaccaccaacaccatgcggtggtgacatctgcttcgtatgccttccgtagcacgggaagtacgattggtatcacggtcgcttcggctgtcttccagaacaccctaaggctcgggctgtggtctcgattgggtgagcgcaaggacgccaaggagctgattgaacggcttcgtgacagcttggacgaaatttggaagctgcccgcagatttgacatccggggttcttgacgcatacatggactccttgcgcgcggtgttcgtgacattgttgggcctggccgtcctgggagcattgaccagtctggctatgagggagcacaaactgcacaacaacctagcccgacgatagagtaggtattcattcgggcatttaaagaaaaaatgttcgagtattatattagatcagctgccatcagcatatatagggttgcggtgtcggggttcgcaacaacccagcagtcaacgtacaggaatagatcaatagagagacacatgaaacaagtattggaagttgtactccgtcctgaagttgtatgtaaagcacatgttggatgatctcaggcattgaccgcttcggcccaacaactcgccaatcaatctcagcttctcctgtacggccccatttttaaccgccattgaccccgaagcagcattttggctctttgcgattggccgatcgtttccctcgaacgaatctcggcattttttcgccgtgcaataacacggttcactcggtagctcatcgcatcgggtgtgtggcaaagacgtggcgagaccatccagacaacgcaacgacctcaccgctcgaggacaccagttgatcgtcgttgcacagaataaagcgccagtctcgatttcaatcctgggttgcatgattggacttgatcagaccaccagtccgataccttatctctttgtacagtctgagagtccccaatcgatctcgttttatcgcctctcggcttcgattcttctctactatttgcgcctacctatacctttcctgcgaaaaagaagtctgtttcttccctccggcttacctccttatccctaaacacttcagtccgccttattggtcacattggcatggcagttggatttcgagtgaataattcaccaattacgaaaggcaagggcattacaaaggggtcgtggtcaagtgatatggaggtggatggacgctataagggaaccgtgattggaaacaaagcggtggaaaatgcgacatcatcccatcctcggcgccgccgattgcttttgtcgacggatagcgctttcgccgacatcgtcctcccgtccctcgttcagaacccatacatcgagctgcgactgatcacagacgaaccatcggctttgctcacgggcaccaacaagatcccgcactacatggatatggtcgacagtcaaacattcgataagaaaaccggcgcgcggaaatggctcaaggcgaagacggcggagctatgcgaatgggcggatatgctcttggttgcgcccatcgatgctggagctctgggcgcgatgctggctggcttgactaataccctgacgttggcgctccttcgtggctgggtcttgaagaaacccgtgatcctcatcccaggaatgacggtgtcagaatgggaccacccgctcagcagtcgccaactcgacgaaatcagtcgtttttggccttggattcgcactatcaagcctgtgctgtggaagtcaaacgggcccgaagacctgacaatactgccatgggacggcctaaaggagttacaacaaacactagagacaacactaaaactaccgccgtgggaagctacccttttgaccagagcaatcccgcatggtgcagcggtcccggctaaggctgcaaaatctatatctggaggtgctaccggctccacgccacaaacggaacattcggggaaggccgatttcttaccactggaaatctggctaaatgtctttgaggatcaactgcaggactgggaaacagcgaaagctgtgggcattccaactcatcttcctgttccccaagaatggcagagccatctacccaaaatgtccactacggccacactcgaatacactatcttgcgaggatctttcgctgcgatcaaaaagcgcattgatgcgctgcctcgctggaaaccgctctccgacctcgcttgccacctcatcgtcaaattctcccgcaccgacatactttcctatctcacagaaaaccacctggaccttctctggacaacctcccgactcacaaatattccttaccgggcatccgcaatctacggcaacccgaaagtactgacatggtggcgcgatgcgccagctctccccaacaaagagtacatggccgacgccatggacggcgcctcacgagcaggatttatcgacgtcctggattggtggctacactcagggcttccgctaagatacagcgaacgtgctctcgaagctgccagcgccgaaggtcgagtccccgtacttgactggtggaaagccgcctccgccaacgccccactgtccaaccccttacctctcaaagtcggcaaatccgtcctactcgcagcgcagtcgggccgcatcgcatctattgcttggtgggacgcgtcggggattccttacagccacaccgagaacattgcgcgcatcgcgagcacgcacggccatgttcatgtcctcgagttctggtataaactcaagggcccaaagatgatctttgataaccaggtgcttgtgggccccacgaagaatggccatgacaacgttctacagtggtggaaagactgcggtatgcgggttgaattcaaaacttgtgacattgaagaagcgcttgaagatgcggatccgagctctggcgctgaggatcgtgttcggcgttggtgggagcggaacggactgaaccttggagttggcacgagtgagtggatgagatcgaaggttctgtgagacttcattttgcatcactgcatggcttgcgctttcggtcttttggcgtcttgggaagggattcatatctcctcttctgttcctgcggttgcgttttgttctttttcatatcatgactccagatgatgacgacgtataatacccatttgaatgttcacaattttcacaattttcatcgcgcggtagagcttcgagtttgttcagaagctctacaagtaatatatattgtctgtgtttaaattgaatctacctcttacatatcttttccatggggcgatagaactcattctcatttttcaatctagaatcaattataatctacaataattcatgtgaattgactgcaaagacctgcttcatatttactttatattcagcttcaacttcttgagacccgggaatgctcccgggccatagttgctgagtcaaggcccagctcgccgccgcggctccaccagtaaatcgcaaacatccagcaacctccaacctaaccaataaattgacaatcaattttgctgatgttggcaagctgcgtcctgcgacgcgtgctgcgtgcttcatgcccaagggcaatattaacccgcacgcgaaaagcatcatcaagtccttataacaacatcccgtcaaatggcatcaacggcctccacaacattacaagaaagagacagagcgccgctcaagatatccgaccaaataaaccgcgcagtctaatcacggccgctattccaagctttgctgtaccacctctcatgttcatcgggctcctactcggtctgtggacttggaaatgcttctggattattgtcatgcaaaacaagctcctctacctctcctggttacctccattcacaagatcagagtctatttcagattacaaagctgagtgcagaccggtactgtgggaggaaaagcagattcgcagtttggatgggaccaaattggctgtttgtgagggtcacattccggttcctcccagggaccgtgagtctgttttgaatactgttgcttcacaaaatacacaccaggggaaactgatcccgaaacggaaaaattccgttgtgatctgttacttccaaggcaatggcggatcgacccctatgcggttgcctcttctctctcatgtcttgcgcgcaattgcggaaacgtctagatcggatccatctcctatgtctaactccaaaatctccccatatactattgctgccctgtcataccgcgggtactggacatcatccggccgcgccacacagtccggtattgagatggatgcccaggcactcttgaattgggtttcagaaacatatgcgtccccagaaactgatcttgaaattgtaatttggggacacagtctgggtgctgctgttgcaacctcagcagtatctacgtatattgcccgccaatgtgagggcaaagcctcaaatacaggcagcaacaggcccctggcgcctatttctgggctcattttggaggcgccgacatccagcgtgaaagatatgctcatcagcctctatcctcagagatggcttccgtacagatatctttggccgttctcttggaatacctgggatatcaaggcgaagatgcagcaaatggctacttggagagaccaaccggggtctcaagtcttgaatgaagctacgacatcaataccccgctcgcttccgccaatttttcttctggctgccgagaaagatgaagtcattccatcatacgtaccaggccagttagaacaacatgccaaatctctcggcttggagattgagaggaaagatgttatgggtgctatgcatatagaggcaccactcaaactggatggtaggaaagcaatggtgaaattcatcctaaacgtcacatccgtgcctagaacataacataataacctcacgagagatacaatatagacgattgaaagtatatagtaccttactcccacttctcaacacgtacgtgcttaatatccgcatccttcataagcgccttaatcttctcaaactccttagaagcctcagactccccgaaagcaaaatgatcctggacctggttccacccgctaaaaagaacaaactcctcatcttcgccctctttgtcaatgcgccacgcaccgcaggaagaaaacggagccgtgtaggcattcaaatgggacacgccattcctgaaaacagcgtcaaactcgcctttcttgcttggctcgacaaagtatcgagttatagcgagaacgggtgcatctaacgggattttggatgtaggtggctggatccgttagcctatatttcttggtaacacccttgacctacgaaattagttcatcgtcaggatcgaagagctcacatcgaggtccaagtgaaacatccagctaacatcaagactgtccttcaactgcgcgagcagggcctggttgatttcaaatgaaagccactggccttcgcctgtatgtttctctacagactcccacccacccatcaggtagacggatgatgggtcttcgatctggcggaggtatgtgacatgatagccggagtgtgttgattgtttctcttgggcttctatgaaagtactcttggcggaagacgaggggtcttgcgcttttaggcggaggagggcgagttcggtcaccggcatttttatcttctctttgaatatatggcctgtgttttggagggattgtttagtttgacctcgattactggggattggacgttgttttatatgtctgtctactgagctagggtggggggcgctttgtaggcagctgttagaggcgtcatctagctaattctcggacccatttgactaatcggggattattcaatgtggttcgctggttttatcactagtggatgtctctggatgtgtgactttatggctacaagctaagggtttcttttaaaaagtcagtatatatctttgccacagaatttggaaaaagggtaaacgaaattgcaatgcgatcattcaaggatatacacgtccgagacaccagcgatcaaaataaatgttaacccttcagcacacgataaccaatgactttgggtataccgatcaagcaaaagactagacaatgtacgaaagaaacgaaaatcgcaaactgcaaagtaaagatcatccgaacttgcgcattggaaccatatggatcagacctctttcctgtaggggcattaataacatgaggtgtaatagagagaaaaaatgacgtaccaagtgagtccagctttctcgatgcccggggtcttaatagcattcctgtccccaaagggattgtcttcatcgtcttcttcttctggctcactctcgctctcaaagattggacgtgtgtgttttgacgaatatgcaagaggcaggctatcagggcgattcggccgaggtggctttcgggggttgatattaagcccggcaaggccgtcattcatgtccgtgtcttgcagaccaagtccatgtctttgcttccaattgccttccaaaatgtcatcctcactatcactgtcataatccacgctcttgtcgagcacctcgaatgccatcaatgcatccaccagctcctcatttgcatggatcaggccgcctaggaactcttcggtttctatatactggatatatcgaaggatgctatgacgaagctgcttgcaagtatcgaatcggttaatgcactccgcatcctcacccactcggtgggtctcgcgattgacgtgtttaagggcattcaacaggttggtgctagcgacggaagaggcagcaagggtttgcaagatctccgggcgctccttttccatatcaaatctcctgtggctaattgataatttcttatctttcttgactttcctggacttggatttctctttgggactggtcagcacagtggatggcccactgcccgctgacacggatacaacatgacccatcgggggctcgtttgaattcgaactcgacccctcgcggagaaccttggctttcgcctgtgtggcaggctgctttttgggaacttgcttgtatagcgccgtgacccttgccatgccaggggtgtccttataagttgtcgcccattgtccaaaaatctgtttacatttctgcttcacgagtggatccgaaacggaatcagtagctgcgatccgcagacgttcgagcaatgcctcatcggcgaaatcacgcaagaagcgttctcctgcattttggacgaggaagtcgagaatagtaagcgcgcgcagttgtcgatggatattgccatattttctgaactggtcagactgattctcagcactttcaatactcatggacttacagtttcttgcgaagagcccgacttgcttccatcgggccgctggcctggatgcgaactacttccactaaatcgacaataccgctggagtcttcgacttcatattgctcgctcgtaaggacctcaatctgtacggtcactgccgagtacggtttctaacagctatatcagtcggtgctggaaggatgtatggtcttcacccgatgactcacggaggattgaaacattctgccctagccaaggtgatggtttcgaaaactgtatacttgttttgagtaggagcaggtctgggaatggaaaatggtccctggtatcaaaagccaatagtcaaccccacgctgcgatgtcggtatataaatgaccccgcacggcgctgtttacaccaacgcttcacaggaagcgggtatgtatggggctttcgacggtgataggaagcaacttgattcgctagaaaaataccggaaagggatcaacggtgtgaaacacaaaataagggttcaagaagctttcgcgataccttcacgtggtgtacgtggtgtacgtgttgtaggtgacgtcggaggccccaggggggtctcggcgcccgttaatatgataagcgcaatggaactaccgcaaaaatgtaaagaatgttttggtgtttctcagtttgtccaacagggcatccaaattgcaaaatggccttgttacaggggaagaggggagatcaaacaatgctgagacagtttaagcttatcggctggccaaaaggggattagggcggggtctcatgcctgaggccaaatttatgagaaagaagtcattgacgactttaaaagaccagcaataaccaataagacctcgagaaagaaagaatagtcaatcctgactacatttcttgtcaattaatcttgaatgaagctctcatctgcacaccggacggacccatcccaacgctcatatttcttacgcgtactgtcccgcttcgtggtctgctccacccttattctggccgtcagcgtggctctgaaatcccgctctcgtctctccctcctcctcccccacctctcctacaaccaacctacaatcatgtcttaccaacaggaacgttacattgccgaattggccgtccagagggcgtgtctcctgacacagaaggtattcttcgagaaggccaagggcacaatttccaaggacgacaagtctcccgtcaccattggcgacttcggcgctcaggccctgatcatctcggctctccggaagaatttccctaatgacgagatcgttgccgaggaggaggcgagcactctgcgtgcggacaaagagctcagcgctgagatctggcgcttggtcaaggacacccatctggaggatgcggagagcgagaatattctgggtggacctctcaccagtgagcagagcatgctggacatcatcgatagcggcaacagtgccggtggtcctaagggtcgcatctgggctctcgatcccatcgacggcaccaagggtttcctccgtggcggccagtacgctgtgtgtcttggtctgatagttgatggtgacgtcaaggtcggtgccattggtactccgaacctccccgtcgatggttctgcccccattgctgccagcaccggtgatcagcattccaaggctgccggaaacggtgtcctgttctctgctatcctgggcgcgggtgccatcagccgtcccctggccagtggtcctcttgctgccagcaagcccatctccatgcgctccgtcgcgaacatatccgacgctgttttctgtgaaggtgttgaggctgcgcactccgcccagggtgacaacgctgccgttgctcagcttcttggaatcaccgccccgagtgtgcgactggactcgcaggccaagtactgctctattgcccgtggtgccggtgacgtctacctgcgtctccccgcgaagaaggactaccaggagaagatctgggatcacgccgctggtgatctaattgtgcgtgaggctggtggccaggtgactgacatgcacggcaaccggttggatttcagcaagggccggaccttggctgtcaacaagggtgtcgttgccgcccccaaggcccaccaggaacaggtcattaatgccgtcaagaccgttctgaagctgtgattggtttatatattttttaatttgttgcctcttccgctacacttgagctcctggggagcgggatcagtttgaagtagatttgtgataccatcgcttgaataaaaaaatacatatgtgacgataagagtacaaaacacggaaccaaacacaatgtcccgcgtagctgaaaagaaaggcgcctcccgtctatttgatcttcttcgccttgagcttgatagtctctccgttgacgaagatacccttgcccttgtacggctcgggccgtctccattctctgatttcagccgcgaattgggtcacaacccgcttgtcgacaccctccaataggattctggtgggctgtggtgtgctagccacaacgcccttgggaatacccagttcaatggggtgggagaagcccaccttgagggaaacgaatttttggccggggtaggcggcttggacggtggatgccttatcctcgatggtcgccctgtaaccgacaccaaccatactcaagacacagacgtggccttcggagacgccgaggatgtgattctggaggagtgcccgaatagttcctagacagaaaagcaaagtgttagacattgataagttgccgtgcggactggaccgccgcggagaaaagacaggaaaacataccccacatagcacgctggtgagggacagtctgatccaagactgacaaactagccttctgacctgtctcgtcgggggtgatagtgagaaatgagggaatgctcaggctcatctcgcctgtgaatcgggcgagttagcatccatcggcgggaccattaagcaataacacattacccttaggacccttgatctcagcaatgaacttggggatatcctttcctcgcgtccgggtgagagtcgcggggatatcgatgagcttgaatgacacctccggggggatggagagcgcggcacctccgattcgggactgcgccggggatgtggtcgagaagcattgtgtgcggggggagaatgcgggcgcgaggaagatgggtagggagccgcgctggaaaggctctcgaagaagctggcgggcgcagcgttggggtatggagcacgacatggtgacttgcgcgtgtttggtcggatgctgcgttgcggactttggattttgttcgaagatgggttacctcaatgggtttagcgtgcacgtgattatctatatgatttcttctttttatcaggttagaatatcatgatctaaaggtaattatgctctcgactacaggaatcaaatattgggcttgattgcttcgggaaatacgcttgatatttggtatttctcatttgatgcagaggttgttgaaacctagtgcctaacaacatccgagaagcgacacaatttgtcccaattgaaattgattccttcacataccgacattcttcgagatgcaacatctctgtcgaggcctaacacagccgagactctacatcccgtagtagctgtgtacaaaaggcatagtgagattgccaccgactagatctccaacgctacacatgcatagaactgtcatatgtacgggcttttcatcgctattcatatctaacacagactaaaagtacggaggcataagcagccaattttcttgtcacatcatcgttatacaccagccgggctagtgttagtctcgggaatattctcggtttatacgacagttcgctaaactgccctctgactcctgaccgtatattaacgatcgcattagtattcggatggaaatttcttctttatggacaagtaactaaatggtgggaggaaactattcaggaaaaagtaaagcgagagttgggcttgagctaaaacaacttgaatgtcaagtctcactttcgaaatcatccttcatcctcatccatttcttcccatcctacaccactcttctccctacctttatacccattcatctcagacaatatacacgagtgatcaaggaccagggcccgtccaaagctacacacactcgtagaagcagccataccattcactatgagggcaaccgatcgcttccaagtgattgcatatatcttcctggcacttacacacctcggtcgagcaagtgtctcccaacacagtaagccactcagatacgtctcaaatcattttactgacataagaagatgtcccaattcttgcaaccagaccaccggacatcgacacggtctctttcctcagttcccgggcgcaagaccaagacagcatcttcaacgaagccgtcaaaatcctggactcgatgcaatcttcaccctcgtgcaaccggcttgcagcgacaaaactagtgaactcgtgccaaacattcagcgatggcaaggacggcacgcagacggataacccagagactctcgacgttctacgatccgtctatgcagtacgcctggcattgtgtgagatcgacggtgctggtacccaaatgcctccctcgtgcctccctgttactgtctcgccacctccacagaagaatcgatttggctttgtgagtcgacacagaggccccgaccccatgtcggatgaagttccaaaagaattattggagcaatgtctgaggacacttgagtcacgaccccagtggtggacctcttacagcaacagccgacagaatgctcttgtgatctgccatgcctcgcgaatcgagacggagaaagaggagcttattgagcttcaacgatccattgccaagagcagtctcaagctcaacaatgggcttcaagaggcgttgcgaaatgcaattgcacagtctgcgcagcagcaatcattcatacatgctcttcagtctctgcaagggaagatcgtgaccgatatggaagcgacagactctgtgttcaaacgaacattcggcaaattccttcgagaaatcgaagctggaatctggtcgctgcaagattctatatctgaggctttgtcgaatgtgcgggctggaactggggtcctcgaaggggtacaattcgagcagctgaatgagttgaaacatgtactaaaatttcaaccaggatatccggaacgtatctactcaagttggagcacttcaacaggctctacggagtgcacatcaagatgcaatgactagaagccgagagacgttgctagctcaagaaaccaatgttgtcgcccagaagaatctcgcatcatctttacacctgtcgctcgagtcacttctggactcagacatggacaaactgtaccaaggcatgcagagattcgatgctgctatggtgtgtgaaatatacatttaccatgtagtgacactatgagactaatctcttgcccctttttgtaggaatggttggccagccggatgaacatgattcttgagcaagaaaccaggatgacagaggtacgagtacattcctacataccggctttctcactgactttgaaagcgacttcaaaacatggaaacctttatacaaagatccgaatcgaaggcaagcgagctacaaaaggcgcaggaccaacaaacagaagcactatctgcccaatcgcgggcccaggaggccattcaattcgatgcgcaagtgtcgcaagctttgctggccaaaactagtgttgctgctgccaatttacaatccgtcatcgacgatgcagcgttaaagttcaagcatgtcccgggtttcggcattgggggatcctcggcatggtctatctgcgccgtcctactcatcgtccttgccgcccagaaccttaagattgcaattgctttaatttttctcattttgggtaggtgtgttcttcatgatcaagagtgattggtgctaatataaggaggattaggccattctgttgcccttattatcttcaaatttctctagttatacacacgctgcgcaatgatttgcggaccagataccattgataccccagctttatttctttttttcttctattttcgctcctatctctaccatctttgcttgcagcacatcccctatggtcgttcattgcctctagatctatagcaatggaataattcagtcttcttcatttgatagacggagtacggagactcggaggagctatgtatccccccttttcgctaattatatgaaactaaatagacggattgtttcagaaaaaaataaaatgaaagtgcaaattagcgctggcacagccacaatcactagagctgccagaggataagcagcgggatatgacccatttacatcgcagtcagccaatgaaagcgcgttctcgacacagtggaaacaacgcacgagaaaggcaattccccaaaataacaaaaacggcaagtcaataggcatagatgggggcagtcacgtgggagtaaacagatcgactgcgcgcttctcctccttttcgattcgcaacacgttcctcatcgggtcttgattcacatttatcaaatatctgtctcatccaatctcaaacgcgttgatcaaaatgcctggtgttcgtgagtgaccataactacctcctatacttcccgacccaacatttggcgcccgtcggaaccgcaagtaaacagcgctaacgttctccagcacccgacgctcttcagcaggtcaagaagggcttcaagcggttcttcagcctccgcaagaagtccgctaagaagcagaaggccgagcctgtccaggctgcccctgctgagactgctgcgactgctgcccctgtcgccgccgttccgaccactgagacagctgccgagaaacccaccgcccccgctgccgccccggaatctgccccaggtatgacattctatcagtttgatatcaccttcgtctcgcttttggctcccaactaacttattgacctactctagatgctgccaaggtgcccgaggtaaaggatgcaagcaccgcggagcctgtcgcctcccctgagatgaccgctactgccggccccatcgagactcagtacgagcctgagactgctgctgctgcccccggccctgctgtgcagtccgatgcccctgctgctaagcctgaggagtctgtcgctaagcctgaggagtctgtcgctaagcctgaggagcctgtcgctaagcctgaggagcctgtcgctaagcctgaggagcctgtcgctaaccccgaggccactgctgctaaggtcgaagagtccgctgctaaacccgaggccactactgctgcgcctgtggagcctgccgccaagaccggttagtcaaattgtcttcacgatgcagagaataatgctaataccgatgttagatgcgcccgctaactagaagtgtgtatatccacttcattggccagaatggacctttcttcgcgaatctgatctaacttgcgagtgcttttttcctgctccctgtttcgtttcataccctcagcgttgtgtattaatcactttcagaaagcgatgcgttgcatgctgtttttcttttcttccatatcggcctcgatcagaccgcttaatatcatgcaaagctctactcattcattccagaatcattacgcgacagtaaaacccccgccttaatctggtatattatgctactaatgctgacagcagagaagaaaaaaccaactcgcccacgggtatcacattaagaatctatgctaatgctgaacagtttcattcattcccgtctgaggaatgatcatcaccatcagccatagcgacatcttcaacactgacacccgccgctgcagccttcagctctctcgctttttgtctgcgcttgagtttcctatcgcggttcttccgagtccgcttctctgcttcattttccttggcagcctgtgcggccgcaacgcgcttacgtagctgcactcgtcgcttcttgcctggcttcttgcgtgtaagtggactcttagagacgggtgcgccctctaccacgtagactggaagactgttggctggccgtggcattttcgtctgatgtcgtttgagatggataactcgccaggggagatggcagccgggctagaaattaagttagcagctagacaatttgccagacgggtatggatttccttacccagactaaggaattggcccatgtcagcatgtgctgcccgctaacggccacgtcctcaaattgtttcttcttttccgctatccggctttcgtcttcggtggtaggttccccgttcctcgtgccttgaagagaaggtgtcgagaagtaataatcccacccacggaaggctttcacaaatcgtccctcagtgctagcgccagatccgggtgtaggtgaatgcaaccgaatcctcaatttttggattgtgggggcctctgcggcctctgcggttttctcatctgtatccttttctgactgctcggtggtatctttcgttgatttggcaggggcgctgaatagccggaactcgaattcttgttcctcgtcttcattatccgccgcttgcgagggatcattctcttggctagctgtctgctgtgcagtatccagttgatttaaattgagtagctttccaaggcgggcgtatgcatcctgggcggcgtcgtcgtctggtgctggtgattgtgagcgggatgacgctggagagcgcatctcatcgcggcggacgctatataagccggattagccgctaattatatcgaaaaaaaccagggtggattgtttgctcacgtaccgcttagcatttggtagatcgaacattgtgtggtgtgtgtggagaggaataagactaaaatcccgaatcgagaaaagcgatgtttcacgccgctctacggccacggcctgatgacatggcacggaccgcccagcctcacggccctcaccttccgactttgaaggccttttgtctacattgtgactctctactgcgccatttgtttcgtttcatattctctgttttctgcatattccacactccttaccttccgatcattccctcgctggctccgacaaagggtacctgcaccttatctattgggttggttgacgcctcgtgcccatcgcatagcgcaaacgtgcagccaagaacatcccccgattctagtactcgatctcaatcctcataaatgggtatctgtgcctcctgcctcggcgggaatcgccacgactctcctgaggtgagtctaaatccgaagctagtctctttcccgttaccatgttcatcgcgcattacctcggtctgatgcgcgatgcgtgggggttctagtcgcagagtgcaattgtctaacatttctttcttcaagcctgaatctgaacgtctactcgatgatgatccttatcaggccgggtatggctacggagcactcaaccatgctcatcaggctagccagccagattcggaatatgtgaggcgtgagagggaggcgctggaatcaatctgccagcggacatctgagtgagtatactgtcctagttgccttctgttcatatggagttgaattcatgctaatcgtgtcccttagctctgtcatcgatatctggtccatccaaccacaaccacaccttcgaccccaagcaactctccacacccctatctctgcatctcccgtcccatcacaaaggaccgatacaacaacacctgtggtatctacgcaccatacatcaccgccaagccgtcccacctctggctcgtcaggcaccgtcccgaaacactggggtgaagttgtcgtgaacccgaacaagaaacgatctcgtaccaatatcaaaacggattccaaagccagccatgatgtttttggggttctcaacgtcacctaatatgatgcgtttggggcatgcatcgctgcacattgacgatgacgatgtacacgacaaacgagggtgtgggctggtgaaaataaaatcgaggatgcagttgagggtactggaagaccgtttcattattttcttgcgccatgctgttatttttgggggttttttgtttcttgcattgatcgcaggtcgactgtctttcgcacatagccattcattcctctctcttcctggcctgataatacccattggcgcagactctttcttttgttatcagattcttttctgtaccccatgttggcttcttttatgttggcgtgtttttttatttgctgagtttgtttctttgtcttcatatcatcttgttcgtcgtgcactgcttgtatatgtagttctcttttgagtgccggactttattctttctgaattgacacacaatttggattatgtcaagtgagtctcaggaaatctggataatgtacgtagacttctagaatctcaacccatatagtagttcagcttgaggtgggatggctttttatatagaaagtatttcagtttactatacaattgagatatcatgggaaattataaagaacttcactccccatacttatgagagatcggcatcaattattcaacctgtgactccgccgataatgatcgtaaatgctggactgaatgccaatgacaagggggaaaacaaaaatgggattgacagggaaaagaaaatggatacatgacaactcccctatgacagaagaaaaagaaaacgcccgctgatatccagggatggacatagaagagagtaggatgatgcaatatgttcgtgccgggttgatcctaaacctgacggaaatgtcaaactgcagaccattagacatcgtccattgtacccgcaggctcttcaccaccagactcgtagctccccgccgagctgagctcatcttcagactcggtgtcctcgcctgcttcatccacagcctctttgctggcgtacttgtcaacatattctaggagcgagcggtcagtatggtataatagcaaacataagcctttgggttgtaacacacctttcacctttgcctcatatgccttgggttctctcatcatcagcgcagctgcttccccgttgagaggatccgaagggttgggatagcggaggagctggggaaggaagacctcgaagatgttgagcatgtcatacatcggcgaccaggtttggttgatcacatcgagacagactgagcccgaactatagcagaagaatcgcattaacctcaagagtttcatttccacacatgtcagaccacgcttgactcacagctcatcgatgtttgggtggaagattcggttgacgaatccgatgctcgggcttttgtatgggtactgatcaggtaattcgacgtgaattttccaaaggcctccggtaaatggtgctagaaaggttagtatgatctaatactggtcgattatgaatgagacatactctcttccgggcccttgaaacgaacgtaaaattcttgcctgttgcgagtagttggtatcggagagcttcaaatggttgattgtggtgtgttaggtacatacactggagtccggagttagtatagatctatagctgacagagggccagaacttactgttgtcattgaccagtgtcacctcatagtcactcatgagcctagattaaccgttagtatatttcccgtcaaccaagtatgcttgccgagaccgatcaaaaacgttcggagaagcggcggcgaatttgaaagggtagggagttgtcggtcgtacatcctagcgagaatgttagtgccgtgtattttgaacatttctgaacttctagagcatacttcatgacctatatgatgaacaaaaaagagttattagcatctccggcgactctgggggcttatcggacgatccgcaacattactcacatctgtctcgattctgcgctttgggctactcatgttggtggtttgaatgaaggagtattttcgatctcgaaggtattatcagctgcaggctctcacagaaaaaaataggcccagcggtgtcaaatgccgtgattcgcaagcagacccggaggcggagcggggaagtaatgggcggggcagacgatggcctttgaaatagatgttaagtaattcaggggtcggtgattaagtagaagcaaagtgagagggataacagatatcagagaaggcttcacttctcccgagcgaaggaaatagaaagaagagacgagaatgaggtcttggatgaatgatccattagatcgggcccgcggacagtggacctgcccgtgtgatgagtcgatgagtcagcgcctgccggggcccggcgccatgacgatgacttgggataggtcgatacacttctacggtatataattgagaacataattggttcatctttccatgatagtattgtagggttgtgttgctgtaggcatctatatcgtgctacatgaatggttgaactttagttatacctctgtgagtaattctcgcggccattctatagttacactctttgaatagtgtttccgacacacatgcacaaaaaagaaagagacatgcgccctgtacgtcctatatgttgtagaaagtgtggatcagatgtcatccatagctagccatgtactccctactaataggatacttagaacaagaggcactgcggctaccattacagaagaaatccttctgggagagtaaatagcattttctttcgattgtctaaagctctttttttttctgatcagaaattaagcaaaactgggtcatactctgttacctaggtccctccagttaggttaggatgggtcacgtggctgcctcagctacagcatagtatcatctctttcagctatcagtgcaacaatttttggtcatgtttctttcttatgtctatgattacaggtttgaattctagcatacaatgttatcggtgagctgtatgtttggatatgactgtagtatgtcggctttgaaaaagaaaaagaaagtgtaggtaactattgcatgtctcctcctgaatcctatgattgggaataaaaggggcatatataaaaatcgtgggacaagatgatacactcagtgagcaggaccatatacatcaacgttcttctgaccaaagtgctaccactcatccactttttaccatggccaccgaccctttgaaatataatggaccaaatcaaatccgaccctatctgatgaacgtcttgatgatgaaacatagaaattgaaaagtcacacgaatttgtgtcgggtgaaatgtctagggaggtaaagggtaaagaggcacgatatacagctcgaaggcatatctggactttatataggcgcaagctcagaataattatagcctcgatatttcattgtagatctttgacggaagaagtcagtataaatcaaaatatcatatggaaaatcttcaatcaatttgagtgacgtgcgaaatactgcgctcagcttcttcttacgtatctagttgtataaattctgaagtcaaggggagaaggtgatcacaaaccactatgcgctgatatctaatgaagtagtagttgtttgtttatatataaacagcatagtcagccctcgagccattcccattcatatgccgctatatatcgcgatatgggacttgaacaattctgatattcaatttgcaaggatatgagaagcatttcaatcgaatctcaactacgatatattctataaatgtctttgtgataaccagtggtaaaccgtagaattcggtgacgagcataattgctataaaccaatgtattcatgcatgtgtgttctctagcggtgtaaatgtgtatgtgttgttagctagacttccctgataaaagcccaactgtagcagcttaactcgcagcaagtatcctcctcttcgcaaatcagatactagtgatcatgtttacgtctgctacgggtgcctaattaagaccgggcccgcaggaacccgctgtacgggaagaaagcgattggttggaaagtggaaatagtggggctgttgcctaaggttgcctaaggatgcctggacgctaacgctaagtggatgtcaacgatatgaacctaaacattcgaatgttggcttcctctttatttaagacttcgtctccccattttgccagttgatatatccttacgcactctgattaaatttgcaccattctcaacatggcttctttgcccaccctcccagtgaagcacaatgacttcgtgaagtatgtcaacgccaacttggagaagcccatggtggacttggttcagccatataacgagtttgacgccgttctgcgaaagaaattcgcccaagacccctctcatccatcaattcaagataactatgccaacattgtaccgctgtatggccagaccggttccacaaatatttccattcgagctcgagaccttgtctcagaaacgccagagcaaacggagaagtacattttgcccttgagtgcaaaagaccggaaaccacatggttctgcggcagttgtaccctctttgaatgagttcaagaacaactttgcgctctttacagagggctcattgagtgaaattgactggtctaacgtggtcgctgctggtagcgctgtcgtcacctcacttttgcctgtaccagaaaaatatcgcaactcaaagcgtggccttcgcaagtactaccatgaggagtttgctccagcgtcagatgtggatctcttcttgtatggcctgaatgaggaccaagcgattgagaagatcatgcacatcgaggataagatcaagaatactatcctctatgagaccacgaccattcggacgaagaatacgattaccattgcttctcagtatccgaaccgccatgtgcaaatcgtgcttcgcatctaccgctcaatcgctgagatcctcactggcttcgacgttgatgcttcgtgcgcggcttttgatggtcgccaggtctatgcctctccacgtgcaatcgctgcatacatcactcaagtgaatcggattgatctaactcgaagatcaccatcatatgagaatcggctctccaagtattcacatcgaggatttgaggtcttctggcctgctcttgatagatcgaagattgacccggtgagaattgaatcccttggacgagagggatgaaatgtccgaactaatttttgagatagactatcttcgagagaagttttaccagaactgaaggacttgcacggctcctggtattggaaaagcttcctcggtctcacgaccgggacaactacctccaaaagaggcgtgaggaacgaggtcgtcctcctttgagtttgtacctgaaacgtcgtcagggtaaaatgctgcatggtaatatcaaggatgactgggaggatgaggtgcccgaatggcaagagcaagaccaagtgtccgattaccatacttttgttcgtatcttcaccacaaccgagcttactcccattcgactatcactgaccctctgatagactattccttacggtcggagattcaacgccaggaatatcgagaagctactttacaccaaggatctgttgctgaacgcccaatggaatcagcccaaagaccgcacagtttatcttcatcgtcatccagcattcttcggcgaggcggaatatgttattggcgactgctgtggctactgtcccaagcctgtcaccgaggaggaagtcaaggtcgctgatgaggagggcaagatttatatctttggtcatatcactttcatcaaagatgatcctggccgccaggaaattggaagtttcaatccgatcactgaaaccgattggactggtgagtgaattgtccgaaatgtttctttctttctgaattatgcactaataccaatatccaacattgtagaaatggcttatgttggccgcaccgagaaactttgccaggcaatcttggcaaacgatgttgactccgtgaaagctttccttgcggatgagggtaccgatccagaccgtcgtgactacactggacggacaccgctccaactcgcgtgcatatgctcgacccctgaagtggttcaatgccttgtcgacggcggtgctcgcatgattccccgtatggctgatggaaatacagcgctccatcttgccgccgcccggggagacgtcgacatgattcgaatcttactcacaaagagcaatgagaatgaagaagaagaagccaagaagcaggattctctgaaacataaaggagagtcaaagaccaagcccagcacagacgaggatgaagatatcgatatgattgaccaagacgatgccatgtctcacacctctgcctcttacgtcaaagtcgaaagcgacgaaaagaatttgaacgtgtatgatacgctccaggagaatgacctcgagccggatgtctacgacattaatgtcgttgcatgggatagtcggactgctcctttgcatctcgctattctacatggtcatactgaggccgtgagagagcttgttacatccttcggtgccgatgtcttgatgccaattaaaatcctgaatgagcgcgacaaaacaccccaggctgcaattcttaacctggttcttgttcaagtccttccattcgaaaaagcaatggagatgtcgcagacccttcttgagctcggcgcttcaccagcgcaagcagacctcaagcagaagacaccgctacactaccttgctcaatccgacaaatttggaatttttgatatatacgtgcaacatgatgagccagcagtaaagcgcgccatcaatcacttagcagttcagggccattcctacacaccagaattctcctcggcgttgatgtttgctctcactgcgcagaacgcactcgcggcagccaagctgttggatacaggggcctacccgaagattgatcccgcagaggttatgaaggctattacgatatctagaggacgcaggacctactacggcgtcaccgaagaaaacgcaaagtattgtgtgaagcagccaatcttgctggctattgagaatgacctccctttactcgccattgatctgcttcatcgcggggtaaatcctaacaccgatatcagcgaaagatatcgaaaccaggatcggacggtattggacgtcgtgcgccaaactttgcgtgaccttcgtgaattcttggttgtgcgcaagtaccaaacctatgctaattccatcgcgactcccctcgatccgaatgacgatacatatttgtcagatttccaacctggcacttacaaaatggccattgcaaaggatctactcagcaacgcgcgcaaggcaaaccgagagaacgaagaacaagccaagagggctgaagctgccccggccgatcctcctggtttggctgagaagaaggcgtttattgcggagttgatttgcaactacgagaagctggagtccattctgctacaaaaagatgcaaagacttgggccgagcttcatcccccgcagacaattcccgtgcagttcccagtccacgtctcgaccgagggaacacagctcacctctgagccttggaagatcaacttccacttcaatgtaccaggcattactgattctgctcgtgacggatatctgaaactgtatgtgcctccttttatctcacaacctaagaatatcccactgacattgatataacagtttcgaagcagcttggaatggcgacattggtaccataaaaaccttgacattgggcatgtggggacctctcaatgagaacgctccgcttgagattgctgtaaccgacaatcaaggcctgtctgccctttcaatttctatcatgcgcggccatttcgcagtggctaagaccattcttcgaattctccacgtgcagtacaaggtaaaagcgcctcgcggtcggatacactttgagatagatgtcgatgagtgttgtgatgactgtgatgactctcatgaagagaacgaagatttgaacatagtcagtcacattgttgatgataccttcacccacgagaacatcggtgaagttatgactcaagtcgagagcaatacttctcctcttgagacgttcgagaaacggttcaatgtcttcctgtttttcgacgagtgccagaaggaggattggaacaagcgagccctcctgtttccgaagctgcaccggcaccgggattggagttggatgaataaagacaactcgatcaacaagattgggttgttgaaatacgctgtgtacacaaacaacattcctcttttggagttccttctgaagactggattggaccttgcctctaccaacccttcggtaaaaggtgagttcttggtcaaggtcgacgagttccagcttgcaatctcacttggacgtattgattgccttgccaaaatgattcaaagtactggagctggtcttccacttacaaaattgagtgatgactgttgcgttgaggagaagaaagagcctcagtactaccctgggttgtcgattcgtggcagcaagcgtgctgattgggctaatgccggtcgagataaaccgttaaaagagcgggcacagtgtcctcctctccttattgcggctcgtcagggtaatttggctagtacggagtttttccttggtaccgcacctgctcgctattacttggagtatctcaattcgaataaggatgatgagagagtcaaacgattgactaagtccaagctcggactggaaggaacactcttgacctggcttcaagaaagaagtaagtgccacctattcaggaacccggacgaacatagctgaccatataaaagacaacctcgttatccactgcgcaatcatctccgaaccaaatgacgaatccgttcgtctagttcagtatcttgtggatcatcaccctgaatgcttggaagtccgatcgacagagggattgacgcctctcgcctgggccatgtcccttcacaaggtccgatttgcccgcatcttggtagaagctggagccaaccaggctgtccgcgacaaagaggcgcgcaatctcctccacctgattctcgtatcagccaatggtcgagtctgtaggaactccagccgatgcagcaaactcctagacctgctggataagcaactcctcccaacaatgctcatggaacgcgccggtaaaggctcaaggacgcccttttcccgttggcttcacgcccaacccgactttatgccaagggacccggccattcctcggccccctaagagtccccagaccgaggatgagatagtaacctccatgacgagcctcattctgggcctagccaactccacggaccaaaagcatctcgaggtctttgacgaagctggaaacacacctgttcatgatgctgtgaagaaatgcttcccccaagtccttggacaactccttgatcgtcgtcctgacatgctcaaccgggagaatgccaccggtaccactcctcttgaaatggcagttgacgcttgggtcaacaagagtacctctggaccgcctgacggttctccaaggtcgcaggttaatccccctgtgagtcagagcgctttgcagcgcggttgtcacttattcatccccggtagcagggtcacgtatgacaaggagatggctacgcttcgggtttgtcgggaatgggcccagcaacgacccggaaagagaagacttgttagtctgtttgaggcgaatgaggtcgctaagagattggtggcggcgggacaggctactggccgtgatggtgttgtctccgaagatgataataagtctgaggatgatccgtggggaagcatgtttgatcattgctagtttgcttgtattgaacatggtaatttctagcgcaatgattatttgtactgaatggtctttcttttttgcaatatatcctaatcatatctactgcttcattccctgtttctagaaattccagctacttgccaatgaacattcctgtagcttcttttccactatatactggaactgaaagattaagaaatataaatactcaaaagcagtagattatgatcacctcaaaaaatatcatgaacttaaccaacccggcttctgactcagtgctgctcctcgggtggcagctgaaccttcactgcactctccgccagagctctgttccgactattcttgctagcgatatacgaattaatatactcgggcacttcagcgaccgtaccatcaccgcttggaaccggggtaccaaacgtttcccataccggaacaacaccagtccagacactaccagtaatctgcgcgttgcctgagtccttacgctcatccgaaacaccaccatcacgaatcttaccgctgccatccacaatccttaccttcaggatgacagtcgactgcatctccgcacgatccggcggcacacgcgagtgatcccagcgatccgcgaggacagagttcgtgatcaatttcatggcccagagcttttcttcatcatctgtgacgagggtcgcatagccgtgtaggatggcagaacggtagttgtagctgtgcgagttgggcgtgagcgataggatcagcccgtctactttgcttgttgcgacgcatatggggagtccctcgccatcgctgcagctgcgggccaggttcataatccgtgagctgacgtagccgtggaggtagcactctagaggctcatcgatgctcgcagaggggaattcgaatgatcccatttgtcctatcatcggtaggattgcggggaatgggtcgtccgggcctgggttgaaggatacatgaagaacttgggagtcattgatgattgaatgaattggacctaggtcatatgtggctagaatatagtgttaatagttgaatatagtgcagatctatagtgatctcgtacctcgatgcttgtaccggttggcggtgttggaaaccttcttcgggtaggtcaaggttcggcccatgatgtatggcagtttgtagaatgtgtgtagttaagagaagcaagaggtaagcggcgacgatataagcctttaagtgtttactacgtagatagatgatgaatatagataggtgatccgatgagctagggcacgccttcaaacaccctttttagcaggtccatccgcgcaaggtttccccacaaaggttagaccgagacattcttgatagcaggctgcgcacagatgcatcaaaccaagaatcatgtatacgacatgacatgggagtggacaagagaatggtctccgatgccaaacgcagccgaggtgattggcccacaccgccgactggaccgcgaacctggcgataacaacgactccaacagtttactcttatcacttatttttgggaccttgaagcatggcggcatgcaggtctctcgtgcgccagtgcgtcatcaatctgcgctcatctagacctttgagtcattcattgcgccaactgcctagatgcaaccctctgtctcgcagttatgctacctcggtggccgccgcggaactcagattcggccaaccgttgcatgagacgcatccccatatcctcagcgcaggcgaacgtttgtcattatctgtgtccttgagtcttgtttatttcgctgatcgtctgttgtgtagttactcccggaataaccgcccttgaatatgcacaacgtcgatcgaagctcgccaacaagctacccaaaggcgcgattgcggtgttggctgcctcggaagtcaagtaccgtgcccaagggatcttcaatgagtaccgccaggattctaatttcttttacctgacgggtaagtttgcttggcacgcccgtgatgccgcggaggacacccgctaaacagttccacgccggataggattcaacgaaccgaatgcattagcgatcatcggaaacgacggctctggcgataaccatattttccatttatacgtgcgggaaaaggatcccaaggcagaactctgggatggggcgcgctccggcacccaggctgctgtggatgtcttcaatgcggatgaggtgcgaagtgttggcttaaccaggtgaatcattgagctgacaccgagaacagacaggaaacattgaacgcattggagatattttgccgagtattgtccagggagcgacagaagtttactcggatatcccgacattcgatggttcaagatcatccttgaatcggtatctgtatggaccaacactcgcgtcggaaaagttgaagaaggtcgtcgaccaccgcagagtcaagcccctgaagaatctgctcaatgaaatgagggtgttcaagagtgaagatgaggttgtacagatgcggcgactgggacaagcgtcagggagagcattcaccgaggctatgcgacaggactttacccgagagaaagatctctattccttcctggagtaccagttcaaggtgaatggttgtgatacaaacgctttcgttcccgttgtcgcgggtggccaggtaaatctctcgacttttttttggtgaattggacactgacgaacctagaacgctttggctattcattacacacgaaatgacgatgtattgaagttcgtatgcctttccaaactattctgagactctgctcacgcttaattttagggatggtgatttggttctcgttgatggcggtggtgtaagttcttctaatctgaactcgatcttacagctctaggatactgaccaaattataggaatggggaggctatatttctgacattactcgaacatggcctgtcaatggcaagttctctgatccccagcgggatctgtacaatgctgtgctcaaagtgcaccggagctgtctcgctctgtgccgcgagacttccaaactttctttggacaaacttcatagcatcgccgagaatgggttgaaagatgagctcaagtccctgggctttgatatttccggcaatgtatgcatccgacctccttccgtgggtatgccgctgactccgactaggcactgaacgttctcttcccgcaccatttaggccactatgtcggcctggacgtccacgactgccccgggtattctagagggtacgacctgaaagcaggtcaatgtataacaattgaaccgttcgtccccagcctctttctccgcagacttgaaacaagctaatacatgccaggggtatctatgttcctaatgatgaacgatggcccgcccatttccgtgggatcggaattcgcatcgaggatagtgtttgtgtcggagacgaacacccgattgtcttaacccctgaggctgtcaaggaggtatgttttaactctagtaaccccccgcatgcactcgtgactaacttttaataggttgcggacattgaggcactgcgtaattagatctgatgtatacggtagccgttagatccctcaaattcccatgtacaatagcataaggcttcaaaagatcatatttgtgcccctttattttatcctatctaatttctaaactaaaccctacatgtctggactatccttgcctagattactttgtggtggctggtctgcggccaacccgaaggctggtccggggaggttggagtcgattcggcaatttttagcggctgtatgttaataagagaacattgcacaaaatatccccagagaatgagaccgagaatggaagtagagaagcaaagaaacccgaaaagaatcttggtcgcggtcaaagaatgcaatgttgatgttcatgcttcgcgctctgccgttggttgtcaggcctccgcccaaaacaaactaagctccacaccacacgacgtgctttgctcttctttctttcctcctccaggtcttccacctcgtctttctcttcccatccaacccttgaacacttcgatctatttctctttccttcggctgcttgttatcgtctcttggatacaatgtccattctctgatctcctctaaccttagacgtgtagcacgcgtgctcctgaccgagtacccctctttgatatttgactgttgtcactatacaacgtttagacgcgttctcgaccctgggaacttgtttcccaatggcaactgtcttcgtacctccctcgccacgaaactccatggccatggcgactcgtcgtccactcgcaaacgtgccgaatgcaaccaattctccacacagggcagggctgttaccagtcaaacgagctcgctctactcaaacggagatcccgtacggacaaccaccgccgaagaaacaattgattgagagcatgcaatacgagtctcgttccgccacctgtcagaccacgaacacggactcgaaacttttcgcccgacgatcgaacaacagtaaccctagtgcgtttgaaaagaggctcgtcgcagccagggagaaggaacgccaaccgcaagtgaagcacatgagagtcgagaaggctccggcagataccatggactccattcgacaatggcagcggcactataggaaggcattcccacagtttgtgttttacttcgatagcattcccgaggatgtcagacggcggttctctcgccaggtcactgcacttggagctgtaagtcatattgcccacagaacattgagctctcccgtcttcagtgattacacacccccattggcatcttctctaacacactgcgatatagcgcgaggagaagtttttctcacgcctagtaacccacgttgtcacctcacgagctatccccccagaatcggccaccccagcagaaccggagtcaactgtagacgctagaaaccgcgatagcaacgttctaaccgtcaacccttctctcatagagagaaatggcgacaatcacctgcatgcttctttgaaaaccgagacccgacgtgaccaaggcaccatggacattctgcaaagggctcgacagatgggcatgaaaatctgggcgttggaaaagcttcaacgtatgatcactaccatcaatgacagtgacatcgccgcccaatatgaacaggctgctcggaataaggccgctggtggtaacgccgccaacgctgatctttcgcgggttcttcgtcaggaactgcttaatgggccgtccgatcgtgatccattggcatcacttgagatgataatgttcaaaggtccatttgtctacatccatgacatgaacgagaagaccaaaccagtcatggttcgagaatatccccgagtcgctagacgccaggatggatcttggccacagttccgaagtgcccccctcggaaaatgtcccttcatagatgagcccccaagcaggaaggaatatgaccgacaccgattgcgccaaattcacaaagagaagaaggctgcatctcacgcggctgatgggacacgtcatgctaagccaaaagcagctgcgccagttcaagctcccgaatctgtgaccacaacagagatggcacactcccagccatcggcaaagcaagaggaacgggttccgcctccaatccaaaatgaaacccaaaaaccattggatgaaacccatgagcgaaagagttctgaaagctttgttcctccccacttccctcgcaccgggcccttctatgctggttgtgagccagctgcctccggtattcagccgtcgaacatgacatccgcaattcgctcacaaatgatctcatctactgctgctgcacctggcgcgaaagctgggctcagcaaggaggttcatgggctcaaacgaaaggttcttgagaaaggtacaggtggattcacggcgggatcgatggctgctcctcaacgccgtggggatggattcaccacggttacgacgaagaacaacaccaacccccctggtaaacccaacgttgtcatcaatgaaaatgaggcaaagcaatctgaggtcgctggttccaagcgacaaagggaggacaaagatgagcaaaagaaatccgaacgccgcagagatcctaagcctggctattgcgagaactgcagggataagttcgatgattttgaagaggtaaaaaagattatctaggtttccttgttgcttaggtccttctcgatactgatcaatctcttagcacactttgactcgcaaacaccgtcggtttgccgcgaactccacgaactgggctgaactcgatgcattgctctccgaaatccagcgccccctcaaggacgaatatgaatatgacgaatagatttgccgtttctcacagcattccatgatttcctttcgacctcggcctcttctatccgatactttcgcaccctggtggagtatctttcttctaccacattgcatttttatttccgtcatgtccgatttgaacctcagaacctcgcataaacataccctcggcatcgacacatgcatggtggcgtttttttttccccctcttctttttgtttatcatgcatcagcagtaccagtaaccagttcctctccgacggtctgatctgcttggcttgacctcaatggaggtcgtccactcttttacagcatctttcttcacttctttcgattgtattgaatatccgattttaaaacagcatcaggtcgccttggaattcgtgaaccgacctatatcaaccgccgacggcaattttggatactttcatttctcatgttgctccaagaaaaactcaacgtcgacgctgcttgtctcatgtgcaaccagcttctgctttacggtctctaatggtggccggttgcgatataccgaaggtataatggacgatttagcatggaccaagggttcctaaccttgcattgcactccgttctaacacatcgttatcccctttttggtcccacggggccatattttctatctcgtcagcttttccttgcgtcttctcactggtggtaccttgttttctgatgggctgtggcttgaatacccagcgtaggcggccgagtctctgttgagatttttactttctcgtgacattacttacccgaataaccatttattcgactcgatgatctgtatgcagtttgtatcgtgctaattgaattgtctgctataaaatatattcttcagtagagaacaccagccagaagtagaaaagtagaaagtgtgcgaggcccctcacttagcccaatgcggtaatcacctcggcgtgacgtaaactgcgagcggtgacattagtgccaggcggtgagagtaaaaaaaatatcccctcgagctccagtcaatgtcaacataataaaagctttatattgaatattcagttgataaagagacaattatcatagtcacatattcctactagcgctagatcggcgtgaatgcaccgttcctgagcccatctaccttgcagccccgcaaaacgtctcggtactcggccccgtaatcggcggcagtaacgaagatcttcaacttcaggaatgaatttgtgatgctcccaactacgccgcataacccagcacgttccgggcagaaggatattgaaaatacaaaaccgaagctccggacatattcctcgatatatgacctctcgccctcttcatcgtttttgctcgcacacacgaaaagcttcagttcgccgctgaagtcataattcctttgatattgccacttctacagctcggacgggatacaacttgtgcatatatcattgcatattggtacatattgagatatatacttcttgggcaccgaaattctcgctattcgagatcgtgcgtcacgaggtgcagccgcgccactccgtttttgacaatcataccacaaacccaatggccgccccaggctctgtgctgcagcgcacagcgctaatctcttcatcgatgctaagaacgagagtgatatccgctaccaggacgcaagccacacacacccttcgcaccggccgctgctctgccctgtcctcccacataccgacgcaccccctcttccaaacccgacatagctcctactccgcgcccacactccgtgaaaatgaaaaggcgcgaaagaaggttactatccagacgctccagaacatgcacaaaaagggggagccaatcacaatgctcacggcacatgactttcccagtgctcatgtagccgatgcgtcggggatggatatggtgttggtaggggatagtttagggatggtagcgcttggactggaaaacacgacggaggttgttatggaagagatgattcttcattgtcggagcgtagcgcgggcaacgaaagccgcgttcattgtgagttgccgggattttttgactggctccacagtgccaccgactaacaatcataccccaattccaggtcggagatctaccaatggggtcgtatgaagtgtgcgcagagcaagccatcgagtcatcactgcgtctagtcaaggaaggtcgcgtacacgccgtcaagctcgaaggtagccaagaactcgcacccacaatcaagcgcatcacacaggccggtgttccggtggtaggtcatgttggtctcacaccgcagcgtcagaatgccctcggcggcttccgtgtgcagggcaagacggctgtcagtgcggtgaggatgctgcacgatgctctcgctatgcaagaggctggcgcgttcatgctggtgcttgaggcgataccgtcggaggttgcatcgatcatcacgcagaaactgcggatcccgactatcggtattggtgccgggaatggctgctccgggcaggttctggtgcaggttgacatgactgggaatttccagcccggtcggttcgtgccgaaatttgttaagcagtatgcggatgtttgggatgaggcttcccgtggcatttcgctctatcgcgatgaggttaagagtcgggcgttcccttcagaggaatacacgtatccaattgcgaaggatgagctcgccgagtttcagaaaacggtggacgaggtcttccgggaatcatgatgcgcctgattgccattttttccgtggccatttcttgcatattttgtctatattaatgcatcatcatcatcatttgtacatagcatcattgagcagttcgcgctggttgttcatagcctactcagccgaacgctggcgtcattgaataagcgacaatcaattgatcgtccgttttgaaacactattatgacattagcattcaaactcgaggaagtacggtagaaaatcgagttgacactcaccctccatagtccgcccatgccttcatccagcccaggcgcaaacacactattaacataacaaaagacagaatcggtctctttgcagtccagcttcttgcgcaggaatttgacaactgtctcgaatttctgcgaagcgctaaccttgaacacccgacttttcaaaatcggggctgatggaagaggctggaagcgaacagtaacttaatcactattagttgaattctaccatctgaggatatcgcggtgatctgatcaacccaaagcccggagaagaggggtcctacctttccccgaatcaatactctccacgtctgcaagagcctcgtgcgcatcacggggtaaattggtcagcatgaccgatgcagacatattcatcggtagatcagcgccatggtcgtcatctgggatcggggcgtttgctgagctgggagtgcctgagctctgggactgccgcaggcttgggcgatggctgagtgtggtttgtagatttggagtgggggagcgttgtggagaacgtgttggagaagatggattcatgatgtatgatgctacttagagaggtacgtagatgggaggagaaagatgtaagtaagttgggggttgacggaggcggggggccttaacgcgcttaaagtttgggctacgcttagatgtgtaaacaatcattttctgtagagcttcatagctctgaaagaagtttgccttcttttcttttcatagataattgcaaagggtttacttagatccaaccttctggggtcggaggtgtaaagttaacatcaggcagaattttatctgggaaaagctctctccacttctttccaccgtcctacatcgtcgggtcacgcaaaaatggaaccgggcagtcttcgatcattgataaaatgcagctgcaaggagtcgcagcctcagctgtagctttcttcttggctctcgctttagcattgtccaaccgaatgctcttgcgctctatagcgaggaaaaccaagaaggacaccccggctagggcaatactctagatccaaacggcctatatctcgccccataggaaatatcaactctttccctcttgactccagtactacatttgtacatgtggattgctatcgtatttcaaacaatgtacccaggctctgacatcacattgtaggctcatatcttccgtatagaccatcgccgtttctcccttttgataagcttcatccagctatataagtagctctctgtttattgctagagaatcatttctgcttctcttttctccctgtcctctgatcgtcccaaaatagtctacagggcaatttcgcagacgctaagaacttcatgtcaaaaactatgcgcataccaacaaaatgtttgataaactcgtcctgttgctcctgtcttactttttggcactgtctagtaagtttggcctcagtttggtctcttttatttcagtcgcgatggcgattcggatagagcaggggcctgagtccaccgtggcggagctcgtccgccttgctgaagagaagggcggtcgagtaatggccgacgtggccactaacctcatctcaatcgttatggtgtgtgctgtgaccctacaaggcatttgacttgtgtaccaggtgttatggagactagttgaccagtatatcccttggtcgctgttccccgtgaaggaacaacaaactgaatcctgatatagctagtttctagcaccaggtgctgggaggttttatattgctgcttttcccttgtccgacaagcccaagaagggattggtgccgagaaagtcaacgatatctcgaatctgcagaccgcaatctcgaatcttcaaaccccaagtatcattgtggatttcctagatgaatcaataaactataagtaggcaatggcatatcgtacaaactatgatcttgttttactcacatacaaatacgacattagaactaagagaatatgtaccaggtcaaggctttcccgagcctccccactggttagagcagcacttcccacaagtggcactattcacttctccggttcccaaggctcgttctccgcccaacggcctggggcgcatggttatgcgcggaatatatatctggggactaagtttgaacggcgatgacgcgggagggagaccgtatatgcagctctgaaagaaacgagataaccaccttcaatctgcaaaatcattcatatctatcaattctatggtttaatctagacctagataacaataaaacagctttatatttaatccctccctctttaacttgcctagatcgatagcacgttgacttgtcaaccaggagaatgatcatagattgaacctctttctgtgaggatgggactattgtcagttctggtgcgagagggaggtcaattacaagtcatctttgattctaggcttaccttactatatcattgagctatgtatgtctctctaaataaaggcagtgtcataatgtttgccagtttgttataatacagtcacagttcctttcatatgggtgtatatggcagcgacaaatcggagatcgtctgataaatgcgtatggtacgcttacggaggatagttttttaagcaaatcatatcttcgtttgatcttccattcaactactctcctccacttctttatcacacaacacaccatggcgcctgtctatcatggccagtggtcttttgacaaggacactttctgcgtgacttcctccggtggccatgttcacccacgtgcgacgtattccgagctggatgacattttctgtgcacctttaggcgacatcagggacagagctgaccatcaagatcactggtacgaagcacaacttctccattttggactaccaccgacaagaagcaaagctgcagccaagatgaggttgatggatgccttccaggatgaaactctagatgttccggagcaaattctccggatagaacaatcactgtcgaagaagtgggccaaacgagactcagaggctcgtgtaatgggtccttcgatgcgacccttatttcatcctatcatcgggagagcagcggcaactgacaataccgaatttggcaccacccagaaaccgtggggtaatcaggagggaaatgcatttggtacaggcttcgccggaggagccagtatgcaaggcaacatgcgaccccaacgaaaccagatacgaccccatgctcattcaaatggaaagaaacgtaaccacgaagagctcccgacccgccctatgaagaatgccagatctcgtggtgagactagtggacccaacttgcaggaccagatccaggtcaacccgaacggcgagaccttccatcagagaccgacagttattccagtctcagttggaaacggacagccactcccggctccaggcatggaattccaacaaattggatatcagacagtgcctctatcgcaccagactacatatgagacagtgagttgtctttccgtgtataagaaatacagtataaccatatctgaccacaaacgcaggacacacgactatcttcacccgggctaatggacatcgacggtccaagtgattagtctaggtacggctacaatccagccaatattctcaacctcaaggctggatggagttcagtagccaaggtatgagtggacttcgggatttggattggtgaaggcaaatttgagataagctaggggcatgagaatttgtgttaggtgctactagggggagaggaagattcgtgaaatgtttggagttcaattgattcaacggaatttgatagcttgccagtctccactttatgtatcaaccagtccaccactatgatgcctcatgtcaaaaatcagtggtactcgttgtccttcaacaagcttcgcctctccacataagtaatctcaaatcgaaatggtgcatcaacaagcccagttgacttctcccattgtggatccagataccacggcttgatcagcaagacctcgaagacggtgggttgtcgaatctgatgcagcgggataagccaatcgtccagacggtttgttacgtgaggatataaatggatagtcaatttcttcaggccaggcagcttggtagcgagaacctgacagcatttattccaacttagaccaccaggatccggaaagctgagctgcagagtgcgaatcatgcttaagcgctgtggtagaagtgtacgcgaaaaatcaataatcgtatctgtgtggttaaagaggaaagtgttcttttggaagatcatatcaataacctcggagtatctagcacgctgttagttggcttatttcaaacatagatggaagtactcacagtcttcgacaggtttgtaaaagaggaacaaaatccgctcttctcgtgtcaaatttccactcggagttctcgtggtaatatgatccgtagttcatgggtgtgatgcagtttcccccgggccgacgagcaagcaatccccaacaatgatgactacatggacagaaattgcgaggctcgctgcataaaatcccgacagtttctttacgggatcgtttccatttgtgctggtccggtcgaataatatgcagcatccggctacatagataatgttcccaaatgagaagtcggacttcagtgggtagacattcgaacagaggcgactgggcttgttggagagtagattgttgctcgcgtcgttttgaaagtgatagtcgccatccacgactagtcgacactttgaggtcttcattctccggaagtggtggggtgagtggcctggggcggggttttgtagataaactgaggtgatttgagtcgtcatcttgaactcggttcttctttgccaaccctagctttttgccatctgcctcgtcgcccaggtttggcgccatatttgaactcgtagagtgaaagttggatagtgttgcgtcgggcgatagcgacataagagctaaacacgctgacgtgtaacgtcagcgcgcgtctcagatgtggactctaaatttgaaggctaagagctaagatttctatgaaggggatagaaattgaattgaagtcaagatgataaatcaaacaacgaacgtcgcccaaatgtaaaacatatagtaccgggacggccttgtttgtctgcattaaactatgccaatgaactatatagcagagacagtcaccaaaatcagacgatacttgcactggatgatctttttcactttcgatcaagctcgggatttcacagcccaggtatatatagtggatttttacagggaacccccatatcgacccttctgcctgattatgcctgagacaaacatatactaacagtaacaaccacaaggaagagacggatagcaccaaaccagaaaaagttcgaaaccacccaacgaggaacgtcagaagcgttatatctaacaaaatccccgtctatccagacagacaggaaagcgaaagaaaaagacaagtaaaggggacatagtggtaaatagccaggaaggatccatcaaggtcgacaacccggccaaagcataacagagggaagagaatagcaaaccctgactccggtaaagaaacccccgtcgagcttgtccctgccggagaggttattgcggagcgaagcgaaggggctccaaaatcattagaatcaatacagtgaagatgtaatcggctaacgttggcagaataatccaaccggcaaaccaaataaaccaggtctaatttggctagacgataatttctattacgtgctaactatgtagtgttagcctagttacccaagcagtttctcaagcagttgcttaagtacttagaatcctagagcaaatagactctcttcctttagattaaactagcacgttacagtgattacagaactataaccaagtaagcaagcaaggatggagttgtggcgatgggggccgaatgaggggccgaatgaggggcggcgaccttgcaaggccaaagtaatatattgtctaaggaagccgatacaacgtacaaaccagcgacgcgaacctaggagcctgactggccaactatcgtcctcgagagtggatactccgatagtcgacgcacagtggtggctggtcaatgccggcggcgacgtgaagacaatcctccttatctcgataaatagggagaggcaggccctccacctcgaaagatggtgccttgctccaccccacaaccggcccacagcccgccacgccccgagtatggtcccgacgaaggtggacgaggtagatattatcgtgggtaatcccaggccatactcaagtactatacgtagtactgtactaatcattgccatcataggttggcacagccggaatgtctactggcatagcagtctaacctaattagtataggtcaatcttggcattttcaatacacggaccatttaatacggtttcgctactgtaaaatgcacagctttgaataccggaggatctattagtcctataatgtctattgtttattttaattcatgtaatcaggctctataaattgctaagtagctgagccagtactccattgattggacctatattttacagaaccggtttagccgacatgttttcgatgccttacagatcaggcctcattcggtataaattccccgcatccccactttcatcttcgcccttgataagctcagctcttcaacgtccatattgtgacttgaagaacatggctgaaaagagcattgtaccggccgctgaccttgaatcatttacggaatatttaggaggctgcaaacgcatcgttgctctgcttggagctggaatctcagcagcgtcaggcttacccaccttccgtggcgcaggcggactctggcgctcccacgatgcaacctccctcgcgactccagaagccttcgatgagactcccggtcttgtctggcatttctacagttatcggcgacacatggccttgcaagccgacccaaacaaagcacactacgccttagcggagctatcgcgaaggaatgaagacttcatcacattgagccaaaatgttgacggtatggatgtcggacaagtgcttctgtctgaattactaaaatcccctcgtgtcgtttttaggtctctctcagcgagcgaaccatccctcgaagcagctgcatcttcttcacggcactctgttcactgtcaaatgcaccaatttctattgcgattacaccgaagacaatttcactgaccccatagttcctgccctcgaaattccaaagaagagcccaggccttaatccctctgcggccgacaagactggcgaggaagcatcgaaagcgctagcagaagcgctggacggcaccagcaacgaagtagacatatccgattccagcaatcctatcgccacagtgagcaaagaggagctacctcaatgtccgaaatgcaaggatggattgctccgaccgggagtcgtatggtttggggaacccttgccggagaagacgctcagcactgtcgacaagtggatcgcggccggcccaattgacctatgtttggtcattggcactagcgcaaggatctggccagctgcggggtatgtccatgaggctcgttcgcagggcgcccgagttgcagtgtgcaatatggaccgcaaggatacaccgggcgagcttcataacggtgactggttcttccagggagatgcaggcgttattatccctgagatactcaagagcgttattggcgagatctgaatctcatgggaggatggatacgggaatggcgaattttgatattggggtttgcatgaactggtgacgagacacatgatagttggatgacaaggagctttggatttcatacaaactgttatttctaggtaaatctacgaatcttacaaatgaataggccaattgcacagactccgagacaccactgccgtatacaaatgccgatcatgcctcgggtattcaaatttaaaaccctagaaatagcggaattatgagctgatctacaattgcaaccaattggcccgaatccaacttgtatttgatatgcggggttcgtaaggagtacatatatagatctacattaccctcaacatccaaggggtgacatttaaactcggacgcccccttgacaatacgtaccaccatcaattgtacctcaattgcgcgacagacacaatgaagtcgacaactacagtaccccagaaacgaaagaaggaagacagcgatgatgaggatgatattgtcaaagatggtagcctcacatccgctgccgacaatttcttcgaggcactgtgtatgtgatcgaagcttcacgcagtccattggaaaggctaaccttctttccagttgaggccggtatcacatactgcttcgtcaacctgttagtgactgtattagccactaattctatgtgttctgaccggtctgatagagggagcgaccatcccgcgatgttggaagcaatgatcaaggctaagcaaggtgagtaccggatatgttaccagtaaccagggcttatttatgatagaaaacaaacccaattttccgagaatcattacctgcccttctgagctagttgccctatcagctgcactgggatatgctcaagctacaggggttccggtagatgactacgcccatcatatcaattctttcgctaacttcttgcaagcaatgcgtaattgtgcatgtcgactgcggcactcttgctatgggacagtccatacataatgcctccgtcagcagagttcctgttttgtgctttgctggtttgagcccttttactcagaatggcgagttgttgggttccagaactgagttagcaagccaaacgaagaaggtttacatggagccagctgactgatactgaagtacaggttcatccattggctacaagacgtacctgatcaagcagcgattgttcgacaatactgcagatacacgggtgaaataaagaccggacgcaatatcaaacaaatggtctcgcgagctttgcagtttgctacatctgatcccaaaggtccggcatatctaatggctgcgagagaggtactcgaggaagtaagtattcgaagttatcgcaataagccaaaattgtctctaaccatatcttatgcagcgtgtgggaattgaatctctagacggtgaaattctcagttcgatcaccccaagtgcattgccagagcaaggtagggtgataatttgagatttgagatttcatatcgctgacagcaatagaggtggaattgattgccaagtcgctgatgagcgcaaagcgaccgcttgtcattacaagttatcttggtcggaatctcaaagcgccagccctcttagccgaactttgtgataaacttccaattaccgtcgtggagatggtcggctctgacgtttgcctccgaagtgaccacgaagcatatcgcggcgttaccgtcactactcatccggaagttcttcaagctgatgttattcttattcttgattgtgatgtgccctggattcctactgctggaaagcctcggaatggtaagaatgtccaaaaaaccatgtttcagtgctgttctgacacacactgcaggggcaagggtattccatctagatgtcgatccgttgaagcaacagatgccacgtaagttcatatatcgaccgtattgctgacttttctctgcttttttattaacgattacataccagtcttttcaatcaatgccactcgcaagctcaaggttggctgtggaattgcgcttgggcaaatcaatgccttcttggataaacaggatatcgaccgggctaagtataccctggagtttgaggagcggtcaactaactacaaaacctggagggaaactttacaagcacttgaatcaccgtcgaaagatggtgtagtcagtgtgccatatctggcatcgagactgcgagagtctctcccccaaaacactatttacgttttggaggctgtaaccaatgcaggacacctcatccaccatttgaacttgactaaggtatgtatttatgccaatgtgctgattctatgctaatcaaattccagccgggaagtctgattgccagcggcgcaggtggtctaggatggggaggtggtgcagcactgggcgtcaagctaggcaagcccggctcattcatatgtgcaatgtaagtgttcaccagcgcgggagctcttccacaatatctaataagcatcagcgtcggcgacggagtctatctattctcgcagatggaaagcgtatattggatcgccagacgctacaatatccccttcctcctcgttgtgcttaacaatggcggatggaacgcaccaaaggtgtccgcacttctggttcacaaggacgggttatcatcgaagtcgaatagacgaggtcagccagatctaaactaaatatcttgtgcatagtagctgatctagtacagatctcaatatctcgttcgacccttctcccgattaccccggtatcgctgctgcagcaggtaaggcgtggggtgcgacagttaccacgcgaagcgagcttgatcctgctatcaaacaggcaacagaagttgttcaaagtgggaaatgtgctgtggttgaggtttcgtgagtgggaatagtggctcttaagtaacaaccgcttactttcatctatagtgttccgtctatgtggaaagagaactagtacaaaatgccagaagggtaaatgggaaaaccagttctcattttctggcttcaagaagaatttgcttctttttgtggtgtgttatgttgaaactgcattgtctccaatgcaatgggaggtagttgttgctttgaaagtatgaaatatgtcagctactagacatagattgggtactagcttgtatgcgattgatctgattgatatctagatgtaatactattcttgtactattctccaagaactagatgtgccttttctttccctgtgctgcctgaggcacccagccgttgctaggccaacctcaaacaaagcgataaccttttggaatcgataacgacttcttctccctttgatgctcgcaaacccccaccatcgacaaaccacttcggattcaaggcatcatctaagggtgagtgtctccaaccctgttatattggttacattttcctggaactcgaaatttcagttcctaggggatcccacagtccacgagctggtcgagcccacaaataacataaagagactaactgcgaaatccagtgctcagatatccctcttcgcgtcttgatgccctaagattagatcattccagacttggttatcctgtgaagtcaacaaacaaacctatcaattgtctgacaagatctactcaaaccacaacgtcaaaacacgatggctagagaaagcactgcgccaatggagcccctcactccagggggaaaaccaaacacccagcctcacccggcacatatccaggaacccgaattcggaaaaccctcaccgatcggccccgcacagcacaggtcaaaccaccttttcaacatcccgaagccaaatcaatctcgtgccgaacatcatcgacccgtccctcgaccgcatccgcaacagcagccacaatcacaccagcaaggccattcgactgctacaccgttggtgaagcgaagcgagccatgggatccattcaagccggtcgcaccatcagcctacaataaccctcgcggagggttccaacatggcgcagtgagtatcaagcgacccgaaaatgttacttggacaactccccgggcccctaggcctgtatatcaatccaagcctgttccaccaaagatggcgggcgcgacgaagaatatacagaagtttatagatctcacacgcgacgacactgatcctgttccaagggcatcagcctatgcggcgccgggcttcggggctatggatatgaatggctacgtggatacggctatggcaaacgagaacatcaaagctttgctggagggtgcattcgaggatgaggaagacaaggctgagccgaaacctaagggcaagaagaagaagggtggaaagaagtccaagaagatgtcacagaagaagcaggatgatgaagtcgcggtggacgagaagaaggaacaagcgattgacgacctcgatgatcttgctgctcaacttcaaggggtcacagtgaatgacccgaaggataataatggcgccaagtctggaaaagattcatctaccaagcttgatgaagaagacaacgaggcggcagaggcggaagaagaagaagatgaagatgaggaggaggattccgacgatgaagatgccggagtcgtcgaaggcttaaaagtgactcttcttccccatcaaattgaaggtgtgagatggatgtgtgacaaggagactggccgaaagacgtccaaagggattttccccaaaggcggaatccttgcagatgatatgggtttgggcaaaacagtgcaagctattgctttactgctcaaaaaccgcaaatctgatcacgaaaacagcgatgacaacaccgagtccgcaggcaagacgaccaagtttcccccaaattgcattgcctccactttggtaattgcgccacttgcactcatcaagcaatgggaggcagaaatcaaggacaaagttgagccatcccacaagctgagtgtttgcatctatcacggtacaacacgcgcaaaggcttcaacgactttagacaaatacgatgttgtaatcacaacgtatggaactcttacctccgaattcaactcgtccgcatcagacaaggccaaaaaggcgggtattttcgcagttcattggtaccgtatcattcttgacgaagcgcatacaatcaagaaccgtaacgccaaagctacccagtcagcatacgcattggaggcccaataccgctggtgcttgacaggaacgccattgcaaaacaacctggatgagttgcagagtctcatcagattccttcgcgtgaagccctatgacgatttggccgcatggagagatcaaatcagccggcctttaaataatggccgtggaggtctcgctattcagcgactgcaggtctatctgaaggcctttatgaaacggcgcacaaaggatgtgcttagactgaatgacaatgtgaagcctggcgaagaagaaccagacggcaagccaaagaagtcctcaaatggattccacatcaccaagcgtgaggtcattaaggtggctgccgaattcatgcctggcgagttaaacttctacaaacgtctcgaacagcgaacggagaacagtcttgagaaaatgatgggtggttccaaggtcgattacgctggagctttggttctgctgttgcgtcttcgccagtcctgtaatcacccagacttggtcaagggtgatttagccaaagacaaagatattcttttgcagaacggcagtacgaatagccagtcgaagtcggatgaccttgacagcatcgccgatcttttcggggcgatgagcgttgtggcaaagaaatgcgatgtttgccaaacggacctgagtcaggctgaaatcaaggctggtggcagtcgctgtggtgaatgtgaagccgacttgaatgccgatgtcataggcacagaaaagaagaagaaaaagaagtcgaagaagagccacaaaaagcctgacgttccggactcaccgtcagcccgcaaatccgatgcacaaattgctcgttctcgcaaaaatcgacgagtcattattgacagtgacgacgaagacgaagaagaaggcgattgggttatacctcgcgaccagcgcaagatgcctaacctcggaaaagcaggtggctcggacgatgaagacgctgaagggggtggtgaatggctcatttcagatgatgagaccgatgatgagaccgatgatgaggtcgaatcaccctccagaaggaagagccagcccataattctgagcggttccgatgatgagagcgattccgaagcggatgacatctacaacgatgaaggagaaaacggagagcttccatccactaagattcgtcatcttatgcggattctgcatcgcgaggcaccggacttcaagttcatcgttttctccgtcttcacatctatgcttgataagattgagcccttcttgaagagggctaatattggtttcgctcgctacgatggtggaatgacaaataaccaccgcgaggctagtctcgaaaagctccgaaacaacagaggcacccgggtcttgctctgcagtctacgtgctggtgcattaggcctcaatctgacagccgctagccgtgtcgttatcttggagcccttctggaatcccgtgagttacaattttaaatcatctattgcgcattgtgctaaccctgaagctagtttgtggaggagcaagctattgatcgtgtccatcgcctgaatcaaaccattgacgtaaagatctacaagatggtcatcaagggtaccgtggaggaacgcattgttgcgttgcaagaccgcaagcgcgaactggccaatgccaccatcgagggcaagaccggcgctggcaagctcaccgtgcgcgacatgatggcgctcttcggtcgtgatgcagaatcccgattcaccgataaccagagcaccctagacttcaaccagcctactcgactgctgaataccggtgatgagaatgagcctgcttcttcctccactcaggagtctgcacactctgttccgcgcggccggggaaacgaggtcaagcctaaccggccgcgaaatgaagactcggtttatggccgacggtggtaatcagcatggtacgaaattatgaaatgaaatttggagataacgtttgcgggagtcccggttggtgtcaggaatgtgttcgtatttctattaaatttatttcatttcttgtttgatgttatattttactggctgatctcgtacatatcttcaacccattgttgctatgctaaaacacacgtctccttgcccttcattccccattgtcggcctgaggttgctccaggctaaagagtggtggaaccttggtcgtttgatggctggcctcacgcctcccatgtatccggaaacaatgcccgcgagtcggattcccgcccaattttagacatggcgatttcacaatggcgctcggcattgtgctccgattggcatacctatgaatctggataataactgccgtcgctatagataggagcagttcaagcactattactacaagtgtgctgtatgccatctatttagtactgatggatgggctaactcaacttctttgatctattctgacttattatacttgatatggcagggcagaagctaattgagagtctagttgtcaaatccaagtcagttttaatgccgccatccaacacgcttatcacactctagctgagcagaccactcatctagaatgtgtggggtatcgagcagagatgattctcgatgggccggaacaggtacctccatgtcaggttctatggttctggtccggaatcgccgagtctggccttcgtgcgcttgaatgtcagtaattacctggagatctttgattgaattgcgctggcagagcacggagttgaccagcacgccaaacctctcaagatcaaagagcggactagggtcaatgcaaacgtacacactcctcgaatggtctggatatattcaagccaggactcgatcagactatttgccgaagcttttaccatggatatgagagtctggtccaaaggattgcgagcgattctcaaatggtagtttccggcgaaccggacaagggaaccgaggacatgctcccagggaggaagcttgtttctggtggatcatgccttgataggttgaaagcccacagaagaaagcatgggctggggaagaaaacccccgtaaccccggttgaagcatggcattctggagatctttcaatcttgtaactatatactcttccggtctcatttgattctcttcatatactctgtgtgcacccaaattctccttcatacacgatggttcatgctttaccgcgttaatacatcgctaacattctgtgagctgcttcctgccaaattcgctgcccaatttatagctaacgctggtggccttcctagttcgaaccattctcggctgctctctctgctgaggatcgaaggctgagatatgtcttcaccgtccgacattaaagataacggggattggacggtcatttacgatgaccagagtgacgatggccagaacggcaagaaagaagaaaagccttctcgaaggaggcagtctctcgcgcgaacgttatccataccgaagagcatgtgcatcatgtctgacaacaagactgaagtatcgacggtagccgagctgctatccccgaagttgaaattgcctcaactgggcaccgaatcggcggaaagagtctttcctgttcgttccgtcgtctcatttgattccacaccttcatccgccctgcagacaccttccctcgataagctcgaaacaccgatatctcctttttcggacacatggagtgcaggcttcagcaatgaacaagcgggctctcagcagaaaagtccacctgggaagagtacgaatgctgaggatggtgtctcaaagagacccgactatcccactcaaccgcgtgctgagagtgaaattccatcggtactcaaaggacaaccttgctccagccataatcttgacattttggcacagttgaaaaccactgtgcaaaatggtggcgagatccttgacatccacaaatcaacaaaggggatatgctactcgcatgaagatgaagagaacatcttcactcagtcattcggcgcactggttgtgataaaagagtccaacggtaactttgaagtgcatatagcaagtgaaaactccaaggaaatcatacagcattctcctgatcaactcttcgggcttcgaacattttgtgatatattgccatcatcgcaacacagcaactttcttgctcattctaaattcgttttgagcgacgactactcagtccaggaatctggtcctgaggtcttcttcctttgtgtattgtcacctgacggatatattcagggtacttggtgtaccatgcatacgagcacagtatataaagactatatcatttgcgagcttcagcccgagcctcgagggacaaaggttcagcccgatttggagaaccccgaaattcaaacgacaaaagcggatagccagaccttggacatgacctctggagcatttcctgagaatatcaatcctccgggaaaagaccttgataccagaaatagcaaatttcccgacccatcggagcttctcaataccatccctcgaatcctccagcgatttgcaactgctcaaacgctagaagcgctcgttcaaaataccatcgccactctgcagaatatcattgaatttgacagaactaccatgtatcatttcgatattgaccgcaacggaattgtggtcgccgatgcagttgatggttcgtcggggttaacttcgtacaaaggcgtgcatttcccggaatcaaccttccccgaaggattgaagaaactatacacacgcaatactgtatgctgctcttgttctagaagccagggcagttcaaaacttgtgtatcgggcttccaccaacaaaaggcccctcgacatgtcaaacacctatatccatgcagcaccggcgcccttaacgccgcataccgataatcccgtcagggcctgtttgtcaatccaaatcaatgtctttggtaagctttggggtctcatatcatgtcagtcctacgacagtggccaaatgctccatccgctcatccagaaagtgtgctggtttgtagccgaggcggtttcaagtaacattgagcgtctgtcctacaccttaccctttcaatttcgagagccagacatctctttggataaaacgcgcacatctcaggctataaagaccccacccggtgatcttctcagtctgttcggggcagattacgctgcagcgtcgatcatgggcgaggccaaaatcttggggaaaccaatcgactcgcaggaagttttggcattgttcgaatacatgaaagccaaagaaaatgacacggtgttttggtctgcagatatcgctgccgattttcgggatctcaattactcgcccggctttcatcatctttctggtttgctttacgttcctctttccattgatggtcgtgattttatcatcttttttcgggctgatttagagagccataaccttgcttctaattcaagccggcaacatgaatggtcgtcggcagagtttggaaaggcatctgtactgtctttgctctatcgcactttcaccgatatatggcaagagaaggaggttacactgcagaacaaccagttgatgaggcttttactggctaattcggcgcacgagttcagaacacctctaaatgcgatcatcaactacctggagattgttctcgatggttctctagatcaagaaacacgagatcatatttccagatctcactcggcttctaagtcgttggtatacatcatcaatgaccttctagatctcacgaatacggaaaacgggcaaaagttgataaaggacgaggtattagatctctccgagaccctcacggaagcaacagacatattctgggaagaagcaagacagaagcatgtcgatctacaagtagtccaacacgcagccctacctcccgtcctcggagatcaacggcgggtacgccaggtgatcacaaacttgatcagtaatgctatacagcacacatctaccggagcagtgacaatcgagtcttgtgttgttccggagccgctggagacagatcatatctgtgtcgaagtcgcaatacatgataccgggtctggcatgtcccaacagactgtcgaaacattgttctgcgagctggaacaagtatccaacaagggatatatgcagaatcccaactcatttgaacatacttcaagtggccgtgtattcgagacggaaagcgtgcttggcctgggcctcgcactggtcgcccgaatcgtgcgcaatatgaacggtcagctaagcttgaagtctgaagaaggcaagggaagttgcttcaagatcaggcttgtgtttcctcttccgggtgaagatagtattcaaaagcagaactcgtgtgctacgtcaaacggacatgtgcagggggatgaaagaaaagaagacacaaagaaagacaccacatcctcgaattgcgtaacaaaccagaacgaagggagtattccatgtgaatgtggtcaaagtccagaattcgaatcaggaaaatgcgtcgtgcacgccgaggtaggcttgaaaaccggggaatcgagaaagctctccctttctggcgaacagctcgatcagagccaccagccacaggtaccggccgctttccttccaaaagaagatcctgggcaatcatcagaagcgtccaaatctcctgtcaaagaactcttctcgatctcaccacccacaaaatcccctaccgaccagccccaaccccctcaacccagcgtctctcccacgatggactggaacctccacgtcctcgtcgcggaagacgacccaatcaatagcaccatcatgcaaaagcgccttgagaaattcggccacacagtgcacatgacaagcaacggcaaagaatgcgtatctgcctataaagctgatcccacccactttgacgcagtgctgatggatctacaagtatgtcaaccaagaattaaacaaattccaactcaatgcacatactgacactcaatttcttacggcagatgcccatcgtcgatggccttgttgcaacacagatgatacgcgaatacgagcaagagctggctaatggagacacgcctgcgcctcgcattcccatttttgctgtctcggcttccttgctcgaggagaatcggaagatgtacatggattcgggctttgatggatgggtcatgaagcccattgattttcacagggttgatcggttgcttgggggtgttaggcttcagtgggtacgtcaggaggttgtttaccggcctggtgtgtgggaggctggaggatggtttgaggcatagacattccagaatgaccataggagctgagatgggggttatttcgactcgaagaactctgagaagggggtgaagatatccaatacccaaatcggggcattgaaatcatatgcaaaaattctagtctttctccatggtatctatacaaacagaaaagtaaatgcaaaatgcaacaaaataaaaacaaatgtaggtaaactcgtcatatcaaaaattttccgctatatcggtgaagtcaggcactgtatctccacacttaaacgaagggctatatgccttgcttggcatatatccattcttccatgcggtccgataactccactgcgcggctgactctgtccgccaggtccagtagaaccatcccattgccgtttcgaaggaagacatctgtgcctcggcatatgtctgaaggaacttcttgtaggtatccgaatattccgatgggtcctcgttcgcattcgagcagctgcacgttccttcggccgctgttgggcaataagccgtcgtggaagtggtagagtaggtcccttcccatcgagtacctcggccgacgttgttcaaatactgcgcgcagtcggtgtctgcctgcgaccattcaccacaaatggttggaccccatctggttgtgtattagcatatgagattacaaagagacggcagctcaatttacccagaagtagtcgtgttgatctccttgatcatagggtaccaactattacagataatgttgaccttggcggtgtggttcaacacgatctcacccgtgttgaaagtagtatattgatgggtgtcgaggtacatgttgtccgggtgggtttggaacatgctgtcccacttggcgagattcagaaacccatcatgcaggacaatagtggcagtgataccattcttccggacgagttccgctgcctcctgggtccaatttaggaccttctcggtgggcagggtgagcatcagtggctcgttcaccagaccgtagatcgttaccacattcttatatcggtcttgggcaaagaactgcgagagttggttgtgaatctcaagcgaccgcttacggttgagcgtaccgtctgtaccggccaaccagccgatgctgccctgccggccgctatggttccagccattttgactgccaggcagtccgtggaggtcgagtttgatccgtagtccatatttgcggcaccactcgattgcgcggagtagataacgccacgcaatcttagggacgtatgggtcgtcgtcgtaggtagtcacggcccaataggagtatgggatgcggacgtgatccagcccggcctccttgatctcttttatatctgactctgagatgaattcggcataatgctgctcaatcgtggccgctgcggagcttccaagctttttagtcaaggtgtactcgtcgatgataccagcgctagatggccacttgctgaacaaagacgggacaatgaagggctcgatagacagccatccgcctaaattgactccgcggatcggctgtgtgccgtaagggaaggccttgttaagagcaggcacattgtcgttcgcctgggcagtgtcatcccaagtcgagttgatgcccataacggaaagaccacccacagtggcatttgtgaacgtaagattgaacccttcggtctggtaccacgtaaatggatccaagtaggtgcccttggcgtaactctgaagtaccgctgtcagcaaattccatcgaggtgatacactcgagacttactggtatgcttgcgcggctgataccgtccaaattagaggtagtcgaactgttcccggaggaggaactcgtttttgaatctgagcccttgttttttgacacaacaattgcaaccgggatgatgatggcaagcaagaggagcaccgccaggagacatccgaccaagatacgtttcttcctcgaccagttagaccaaaatttccaagccggtggccctcggttgtccgagctgccttcccagctgtcttcatctttccaatgatcttgcacagcaggtccaccaccgccacgacgacgaacccgagcatcagagccatggccttgttccaaataagcaccagacacaactcgtgcgccggccttatggcgtgagtggccctgcgcaacttcagcaccaagtgccgcaccagcagcagcgtccaaagcagctcgcttccgctgtcgtcgacgttcccgacgcaagtcatcttctccgcgagacttttcgatacggtccacatcctcgtgctcagcagcaagacgcgccatagcgtccacactcaggaggtgcgcagcactactcgaagactcagtgctgcgatgtttcttcgccgaggccgcagcagcagcagcatcaacttcccgccgacgctccctttctctttcgcgctcgcgccgtctccgccgacgcgcctcagcctcaaggtcgagatcaacatccctggcccgtctatctctagccggactcgcactcgcactctcgtctctgcggtaccgcctctcgcgatccggccgtttagcaggcgacatagcaggtgagcccttcaccctagaactccccctctcccgctccctatcccgtcttctcccctccccagactcctcataagcaagtccagcctcttcctccctccgtttgcgcctccgttccctgcgccgctcccgctcctcgtcataatcatcgcgttcattatgcgagttcgactcgtaccctgcttccccacggaagcggtattttgcggtgcgcgcgttgccaggactggacgttgcgccttcgtcggtgtcctcgtagcggccacggatgtactccctatctcggtctcggcgcaagcgctcttgctcacgtgtgcggtcgcgatcccgatcccgatcccggtcgcgtctgtcgggtcggtctcggtctcgggattggctgggcatgccagatgggggtgggggttttggtgtggtatgcgctgatcgggatggggaatgtggaattattgttcgtagtgattgttgattgggttgttgtgaggtaagaagaggaaggggaaggagaactgatcggaatgtattgagattgggttggacacgtgggcattgaggaactctagccaagtatcttggaactccatctatatggggtcggtataagtttgttttgctttttccccgcacggatatcccgccaagagattgtataacaaggtaaaatgtcgttatgtagggtttgctccctataaagcccttgatatattattttataaactctgtacagctcacgtcttcatggtgtatacctactttgtcattctaggttaggatgtgtaaatggttgcggagcaacgggtgataaacgcgtccttatatatgtacggagtacggatgctccttatgtacactctagatacaaagatgcgaaagaactcatttgtatattgaaatgcaagatataacattaaatacaccaatcccagtccacatagacatgctccagtccattctaaccaaaatacaaatgttcatatcaacgagtcagggtatggaaactccaaaacactataaggttaaagaagacatcattgcgaagaaaataaaacaaaagtgaacaacgccgaccgaaaagaggagtgataaggaagaaacaaaacgcgggtctgattgtttgtgactgccataagtatggatctgtacagctgtaggggaagatggagacgtggcgatgcatcatgatggtgatgatatataaagaaagggatgaaaggaatgaattctcgctgtgtccggggaatctaatagaacgaaagtgagatggtgcctcgagcactgcatctcttgctgtaaagatcaacgcagtgaaatgcatagtcgatgtgcagtgtgcaatcagacagggtcatcaaggccgtctccctctggccgctcccaatagagggggagccggaacgtgtcgaagtggtggcaacccagccaagaagttagagctagcattcattcgccgacctccttgggtgctaaactgggaagcattgatatccaagccgggatttcaaacgcaactgcgagtcgaaaccacgtaggttagcacattagcccatattgtgcgggtatagattgtcagcagtgacagcgccacccgcacgagcgccaattggttttcaccgaagtcgggcctgtcagctaatgatttgtctggctccctctttgcccaggacgcctggctcagtcggcttgggactgcggtcgcggccctttttccgactgaagaatgatagcatgccattggcttgcttgttcttgtcatcgccattatccatcccatcggcgggggtagagttatgagccagctcactccagctgccagcttcgtttaggaccatttggaccccaccacttttgctcatttgccgcgtggcaccccggtgtctattgttggggggtagaggtcgatggaaggacggggcaggcggcggttggaagggcggcggaggcggaggtgaaggcgacatgcggcttgagggagacggaggaccctgaccagttgcggggtcattggggtcgggtgtctcgctgagtgtagtcatgttgtcactctgttgggcgcggtagtgcgagccatcggcttggatgggagatgtatttttagggtcaggctgtgagaattgacgggcatgcgcaattggatttgccgggcttgtggtattcccttgggttgttgtggcaattggaaagcactcctcgggatttctgggacacaccattagcacatggggggaaatgggtttgacgggaagagaaacgcacattacggcagcaatagcttccgcggcattgccttggtagctagtcagggtgtagtcaaacggttcaaacattgtttcaatgagacggtgaagctcttcatcacgaatttccttcgcagtggcatcttcccttagctcagcgcgcggcttttgtctacgcgctctggcctccaagggcgcttcttcaagaagtagctcctctagatcgtaagtcgcatcaaagttagttttttcgcttgatgggcggaatactggtgggatctgtttgcgctcaagggcttcaaagtcgatctcggcgaagaacatgtgcgaggtgtaggtctcgaacccgatagcaccgattcgttgagtccgatctttttgtatcaatgatcccaacgccctcaagcaagctactgatactgcgggattggtgacgtagtatttcggctgcgccttcttgatgttttcgcttaaggtttcttggcttcggccttcaaatggtcgctgcgctgaaggttagacaggaaagtagacggaaaacaaatctctcataccttgttgtagatgcactcgtaaaaagtaacacctaatgaccaccaatctacctcaaaggcataaccagttccttcatagacttccggggctaggtaggctagtgttcctgatttgcttgtaagaggtttccccggtcggtaatctgatgccacgttctatgaattggagttagccgaagctcacaccagtggtgattcgtgccgatagaacttacaaaatcagccaggtgaacatgtccatcggaatccaacagcacgttgtctggttttagatctcgatgaatgataccctgcgaatggatatacctcagagcacacccgagttccgccatccaaaaccgcactgcatcctctgtgaagcattttcgggagatatggaatcgaagatcaccaccgttcattaaatcaaccacaatatagcttgaatctggtcagcaaggagtgacgatagtcaattccagaatactcacatgtactccatgtcttggaaactgtatcgcaaattgcaaaggaacggatggttcaaatgctcgagcattctccgttcacgaattatatttcgtacgctttccgaacgaaccactgaagcgaatgtcagctacagctttcccaacccggcagctttgtagttccaacaaaccttcctctttgcgaatatattttagggcgaatgtaagacctgtatccttcctttcgacgattcgtacttttccaaatgcaccctttccaaccacacggaggagccggaaatgattgaggttgactagcagagaaggagccatcagcatattattcgaaataatggaagtccctaagacgtcctccccgagtcgaggccagtaaacctacctgcatcgttgcaggacataggtttcccctgagtatttcccatgttgcgaggatagagcgatagccagagtaatcaaagttgactagtatcttgctagcaacatcacacttgttccaaaagtcttccggtcgaatggcgatcgcgtcaacggatgaaggagacagattttcggtgaatatcgagcttatctcgcaatttccatgagaggtgactgaattccgaaggtagaatggccaagcgggggggggggggggggccaaaatattatcgagcttatctcgcaatttccatgagaggtgactgaattccgaaggtagaatggccaagcgggggggggggaggggggccaaatattccaagagtcggcgaagattatcaatgcaggtctagatgtaaaatcccgagatctagacaaaactggatgaaattagaaggccaccagaactcttcaggagaaataaagaagattcttcgattgcaggcctgcaggagatgtatatcaggaaacgtgagggcccgggagcttagtcgcgaagcacaccgatttcgggttcgataaaccacgaaaaaaaaaagttggaggaaccaagttagagaatcgaagagataaatatgacaactgacaccaataccaagaatctcctgtccacttgctcggggaagtgaagcagagatgaaagaaaggggatgaagcgggtgagcggtctggaagaagccggcagtaactgggggccaatcacgcgtgacgcgcaagaaaatcggggaaagggggataaatgaaagaaaagggcttttagttctgtaccgacggagtatgcttcttctggtctgggacgccgtgcgatctacaccgtgctactactctttaagactagttgtgttgtggaagatattgatattgatattgtcgttggtctgtctcttaagttggatctacctgtgctatgaacaatgagactcaaatattccatagatatcacgcactcgctcggcgcatcgagttctacggaatatggttaggtggagagtatatactactactatagcgctggcccagttcgaccggcccgcttagattgatgagcggaggcaatgtatgatatccacagaatgcacagactttttcaattcgccagtgacttgtcacttgtaatcctaggcgacgatcttggcgaaccaaatgcagcttgaaacagggagctttgggactttagggggaaaattggttctatgcgattggggggctatattgtacaatacgatgtagatcgctatttaggcatttagcatgatctacgccttaaaaccctctctcttcatgagatttatgagactctgtgccacttaatttgggcttatctctcgggttctctgtctcgttctctttggaattacaatttagaatcttcccccaagtaatcgtatagttcgatcgatcgaaccaaccaggagatagcctagaaaccatgctgcaatcgactgatcacagttcgccacacgtgtaaaatagcctgtttttcccgatttctcgtggctgccacgttatggaccgctttaggccgaaatgcatggttgtctcgggaactgtcataaagaagggctctggaatgcctgtggaatattcaacgttcgatttgatccctcacctgcaaggacttttgtcggctgcagttggatcaattctaggcgggtctttttgcattcgctccactatggcgctgatatgctgaacacgtacgaatgcgtttgtctcccactttgactccctcaattcgagtactattggttccaccaaacttgacatgtggacgcagtcagctagtgcagggtttttgatccctagtcaaatgaaagaccagcagctagcaaccttagagggcgcccacggtaagcttataaaatggaatgtggaatgggtgaaccttgtcaactcggcgtcgggtaaaaacatgcaaaagataatcaaggggcggtttcagcctgctatttgactttcaagaaacataaacctgggataaggctgcttgtgatcgatacagattatgtatcaaatcatttaatgacaattatggtcttcagttacgtggcctctgtgttggcatattctctttcattttcagcacagacacaagacaagatatatttcggataattatgtttgtagatccctctatattaccttataatcataattaatacgctctaagcgtgaacggagtatctctggggaagataatgatgtattctctatctagctagtgccataggcggccggggtcacctgaccctgacgacggtgacatatggtagttgattaatggcttcatacaaaatgatacccaaattgcagtttatagtacaagtgtacccaaatatatatccgtgcactactccgtaggatgcaggaacaggaatggggtcttcaactatatccaatttgaacttcagccaaatcaggagactggctaacatggcggccattaccaaacttttctcgatccttttcacttgtcctattacttattccgattcaactaatttctttccaatgtaatattatggagaactagtgcacacatctgaggttgttggggtggtagatcggtcacgggatagctccttcccaggtttggcttcctcgattcctcaatgtcgctgccatttctcgttagaccttgtcatttcttcattcatgcaattatccccaatcattcatcatggagagcttcgaaaagtctcggccattactgcagcgcccagagagctctagcattgatgttctagatttctctttcagcaagcccgcctcacacaagccctcgtactcgcgaaatctgatcaagcaacctactattccccctcctggaattgacaatgccctatcttcaaaggaaacgatggtagaggaggcagggcacaaccatcaacttaccaggccaaacacgtatgtagatgagccaggctgatatcacggatgaacaccactgtccacgatgaactaacatgtggtattgggttcagccctctcaatcctcacagcgtcgggaaagaaggactcttcaagccgcaagtccctgcgagacaacctgtcttttctcaaccaagacgactatcaacatcagctgggtctaacaaagacagcggtaaccagcctacggctggggatatagggaacttgggtttcggacaagaacaggcggtgatagtctctcagctgaacgagcccaccgagaccgatacccctaaagaaaccatcagccctgcacgaagggtcgtcgagtcgagtcaagagcgtgttgttgacattgagaagacgagtgaagctaattctgccttacctaagtcgccccaggtgccacatccccacagagagaggcaggacattgagatccaatattctcgtgtgcctcacaaacctgtacaaaatcagtctcaggggtcaaagcgacgacgtgcccctgagaaggacgcatcgtcgaagcagcaggcaccgctcattggtagcaaaaatggtgttcagctaaatgaggatgatctattcgagcttctcatcacaagaatgagacagcgagaggaaagcgagcaggcagtcgcagttatccaacggcaagtcacaaatgagaacatggccttgaaggaagagaaccttaatctgcaggaccggctcaataaatgccaaggactgctcgccaaaacatcatccgagtcaagatctcagcgcgcacaaatagaaaagtggaaggcgaaacttggcacattcaaaggtgtcctcaacgaactcggtcgtgaatatggcgcagtcctggaacaagccaaagaattgaaatcagccactatctctctatcaagagagaaaagcgagatccaacacagtctggacgatatcaggttaagagtttcgaacagcgcagagaccattcaacaccaatgcgagagactttcaatttccgaggggacggttgccagcttgagggaagcgttggaccattcagagaaaagaggcgatttagtcaagacccagctatccaacgagaagaagcgaatcgccactctagaagcttacatccaaaatgagtctcagagccaattgcgaaacttgatccttgtcagaaatgaccagcgcaagatggccgaaaaacttgactctgcctatgacctgttcaccacatcttgcttcaaatcccaggataatatcctgtcaaaactgagtccggtgcttgaacactgtctcgcttcggttcaggggttgaaagagcagtgctctgccgagactttgaatgtccaggagttcaccatcagcgttcaagagactacatctcggtaagttccgtagaagtgtaccaaagaacaacacattttaaactcactataactctagtttcaactcattggctggacaggttacaagtgacgtcgaccgaggcacggaagtgagcaagaatgtgttccaagccctccaagaagtcattcaagccattgaaggcaacctcggtccgtattcgtcaattttcaaacagcttgctaatagcgagagttgctatgggagtttgcaacaaaagcttcagatcattgagcctatgctcgacagtctgggtggttctatcaaggccgtggggttaacagaaacagaccttgtgcgcgggttagagaacttcggtcagaagctttctgaggctcaaattccagcagggaaccctgttctggagatggagatcgccaacaaattcgctgaaaatacccagttgcaactccaactgcaagaaatctcgattgaggttgagtctcttcgaaagcaacttgccaacaaatcatctgaaaatgaacatcttcagcatgctttgaccgagactgttgctagtgaacaagcatctaagaatcaaaatgctcggctggaaattgagaagacggccttgcggagtgagcttcaattactcgaacagagaattcgggaagagttggatgccgcaagcatcgaattgcagggtcagatgaaagctaaatttgaagaacaagtccaaggccttgagacagaaaaggcgaagctagaaagagacttcaataacctccaggcacagcttgcaaatgttcaaagctctttggtaagcccaactgtgcctgacgagacgggttcactaacagtatgcagaccgaaaccgaaaagacagccgaggaggagcgactaaaaaaggcctccatggtaagcgatgcggatcatgatagtcatgtgctcaactgataggcgcagctcaacgaatcacagaaacgaatcgaggagctgaatgttgcttgttcaaaatatatcacagaggcaaaagccactgaggctgaatcaaacttattgaaaagctccgaagccggtctcctgacggaaaagaagagactccttgaacagcttgaacaagcaaaagtaaagaccaccgagcttgaagcgagccttgggctgaaaacagagtctgtagcgctgaaagagaaggcaatacaggatgtagaaaagagggccgaggtccttcagcaggagacggcccagaaatccgaagagcttgcagcaacaaaagaaagcctcgccatgctcgcatcacggtcatcggctttggaaaaggtcggggaagaagctgatgctgaaataatttcactcctccgccgggcccaggaggctgaaagttggcaagcgaccataagagaagggtttgcgaaggtgattgaggtacattcagacgagccttttgagcaaacatggcagaaaatagaagacatcatccagtcctcgcttgttccgtccatcactggcgatacgtcttgcaacaagcctcatgataccgggaatatggaggacagcaatcttcttacactcgagtcaagagaggggaaacatgccaatcgcttcgcggccaatgaatcagataaggggcctttcaatactggtgaagacatgcagccagatggacctctagcaccaaaaagttttagcccctcgaaggctttgaaacagggtgattgtgctgaatctctaccgaaattccctgccggtcatggccatattgttccgttttcaagtctgcatgacagactttcacgggaaaatagcatgtcacttttcaatgacccagctgagctcgagatgctcttcatgtcgactccagatctcccggaagcgttggtgccgaaggatgcctccaagaaagctcccgaataccgatctgttccaggagatcatctgagactaagtcgagatctcaatgacctaaaccctgttctcgggacacaacctcccggcgccgatgacaacagaagcgaaagaccccagtcgactcttgaaaatatcgacagttcgtatgtggataaacatgccaaaaacgaacggcccaacaccaagcgtaaagtagtcaacttcgagggggcgcgttttatcacccaaacagaggttggcaaagctagacgaatgtcagatgcaaccgacaacagctctggaagagagtctgaaagtaaggaaataaagagaacgcagaaacggacttacagccgtcttcgccagtctgtggcacaggaggagacgggttcaattgaaacaactacagagatgcagcctgccaacaaagctttggtaggcaaatctcaacagagctcgacggataagactgagcactcttcgaacgcgaacccaaggccgtcgaagagagcacgaaacgcaaccgacggcccggagcgacgactgagtccgaagggtttggcttcaggtagcagcaggggaaacacagccggccaagctagcaatatgcgaggccgaggtaagcgccgcactcgaggtaagatacccaatgcctctctctaggatagctctagctaacgattagaaggagaccgttacagtcagcgcttcagtcaagacgccggctgagcacttcagcgtgagaccggagagaaataccatttctctattgttactctaaccaagttgagcaaattctccatattcactttatcaaatgcaaggtgtgtgcgacaagtccatatatatccagatactgggttagaaagatatgctgttgtcatggacggatggacgaaaagagccccgggcaaggcgcatgcttcggaaagcgatgaagtggaatgttgttggatatttattgtagttttattgaggtacccaaagctgtattgctcttaacgccaaacacatgctccaacaaaaggaggtttaccgcagaagatccgagaaaccggggaaatcacaatttcccgcttgtcttcggtaaaataatgtacacataggggtcgttcccctgacacccttatcgcatttccctagatacgcgcaaagcctgaaaaaccgttcgacggcgtatcgggataggaattgcaaagaaacgcaggctcgattggaggaggaaaagaagagatcgaaatcgaagtcgtcatcgcggtcgagaagcggatgtttctcaaggcgcagaacaatcggattgaaaagaaaagccgagcggaacccatatccagaatcgaatagcttatttattctttccacccttggtcgcctcaaggaaaagcacctgcttcttaacgacagggtcgtacttcatcatgctgagaggacgatggacacggggccggatcatcgtgcggtagtagcccgtcatggccatagaaatcagccggacggcaatggtacgggacttcgctgtgccgggaaaaagacgacgttagccatcagccgcaaaggaatccggcgggttctcgaatttcgctcccagcgcccgattcacatcccaattgcttatggaatggcgggtggatcatgcgattgaactctcgggcttctcattccacgtacctttcttggccatcttgggcggcgtctcggtatgcttgatcgagttgtctctctgaaacaatttcgaggtcggagttgatcgtttcccgtcggtcacgtggagcttgcttagtcattgctgtttgggccggcccgtcaagttagaggatcaacccgtagacatctcgttggcggattttgatgattattttaaagttgctaggcaccaacgtgtgaataattattctactatacatataatccggggcttgtaagactgattaaattacccatcttccaccgttttctgcaacatacattagatatctcgtctgggacctatggatggactagtcctgccacccccctgccaattcatcttggatttctaattgattttagtcagtataataacataggattacggattactctgtactatgtttggccacctgttaatattgatcttccccgttgaactcgccaactcaatacaagctttaaccgctgcctaggtgacattagtagtatagatttcctatatgtgggtttgagctgtctattcaagatttttcattatgtttgacctgtatttccaactcagaaagttctagctaagtttgcatgagtgtcgtttacatcacagcatcgccgatgtgacgatatcatgatatgcaatgaccttcagagctgaaaatcttccttcagttccaatttcccgatgataccaaaaatcgtggcctgatattatagctattgtggctgaaaaacattgtatttggctcttcagagttagtatgttttacattttacaggactgagagatcaactgcatagcgggtgatatgagcgaggtagtgattactagtcgctaattgatgatctttcaggaaccaaaggttgattaaacagcgcaccaaacccgaaaacatattatcaagatgatctatagccgctcgattccctttgtcctttttgccttgtttggcacaggactcacgcaatccgtgaatggcttcaactttaacaagccaaccggcggccctccaggaagctattttgctgctggctcgtctatccccgttactgctttgcagagcgctgctgcaacggctagtactgctgtacccgatggtacctatcctatcaatagagaaaatggagctcaggaagttaccatccatagcgactgggcgaacttcaatcaggtagatactctcactagccggctacttgcaggatcaaactgattgataatagggtgcggcatatgtctggatcgcggatatggatgtcgactgcgacggtattgactatatgtgcaaggtaggtgattattattgtctgtctgggatattattgctaaccctatggtgcaggaagacgcggacggcctgaaccaaaccaactttggtgctttggctgcctatgaagtgccgttctttgtgattcccgacaggttcggaacccagtacgcaaagcagcttcctggaaataacatcggtgcagtgatctggtatgactttccttctttggtggatatttcagcggcttcctgttctaactaaaagctagtgacggcaagatgttctacggagtttacggggactccaatggcgctaccccccaagttatcggcgaggcctcgtggttgatggcccggacttgcttccccaatgataacttgaacggaaacaacggccatggtgatgctgatgtgacctgtaagtctgaaaatatatatttcttttactttggcggctactaatccaacaagatatcatcttcactggcaacaactcggtactccctagcagtgctctcaatacaagctatgtcaccaacttcagcatactacgctctatgggcgacaggcttgtgacctctcttgcgcagaacctcgggctggtaaatggagggtcctcttcttctattgcaacgacgaccgctggctccagccctactggaggcttctgagtgagaagaaaattgtgctggtaagtaaccttcagctcatattcttacttcatggtcactaagtaattttataggtgcctcttgcaagaccgagcatggcagtcaagtggtctggaaaagtgggaaatgcacgaatgagtgattgcgacctggtagctatgggggatttgatctaaagggaaagataatataaatggcagagtagctgtatgtaccgtactcttgaccaccgcgattttgccgatcggggtatcttcgctctatggggtatgcttaataacgttcaaatactgctttaagtgtatactcgacgattactagtgaacgcagtatatcatagacaggagcaaggaaggcgatcagtatgaaatgtattgagtgaactggagaactgactcgggcaaaagagaacacattttacgtttactcctattgaaaatatataactgtgtgaacagactaaattgtatgatttgtattcgatgtcacttactcgttatataggctcgctctattacctttctaatcaacattgaactcatcggtccaccattggatcatggttgatctgacctacgctctcgtcttttgaagtccaacatttacctcaagatcttcacccttgtccaatactctagcggattccagtctttgccccaggtagagttcacgagtatttcaacccccacgtgctgctgtcgccggacggtgtcttcgttatgtcctcatccacggaatctgcgatcctgctgttcaggactgatgttgtcgagtgccttggattgagtatctcgatcggaagtaaatgcattgagggccttatgttagagcgagactgtttgctaatgcggcaacaatgaaatcgcatggttcagcatgtgtgagttaaggcgcgaggtcggtggatgaatctgtgttggcagtgcctttgattggaaattgaccaaggtcaggggcataggcatagagtctaagtcgttccagacctccaacatcaattgcctactgaatatgagtcattaacatcagcatagacgatgagatgtttatgcaaatttcattgcccatcgatccccgttataaggtcatgagtgacgtgataagaatagatgggggttaaccgtgtcacaagcctccaatgaagtcgccaagttcggccatcgtgccctgaccgttctatgtatagccgaatatggagtaaggggtaaaatgttgaggagaagtcctccaatcatgtgatagttgacgaaggcgtgcttgtttgttgttgcggtcacctggcaagtcacctgaagtcacctgaagtcacatgaagtcacctgaaagtcaaaatgcggggaatgttcggcccgagcagccaattgggcaataatgcctcaagctcctgtggcaatgacttcattgtctgcaatttctgcaaaggcgcgaaaatagaacatcctattaaagaatagaaacgtaaatgtttccaggggtcacttgatgcgtttgcgtgatattacctaaaacccggtttgcgtcggggaactactaacttgattcagctgtgccttacgttttatgatcgaatctgagtctagaagcccataattttacgtgatttcccaaggatcgccaagtaattgccgagaattttgatatcacgcttgcagcgtagttggagttggtccgaatggcgttataatgatctacccgtggacattcccccgcaaaatctatataagagagatgtttccccggacttgagccaacaattcaattcaattcgattccacgcaatctccatctgtcttaccaccttgggtcctttatcctactcccaactacaattttatgtgagtaatataggcatctccctatgtctgacagttactgatacaatcctcagtcaatgacccagagtcaatcctccttcaccatggctatccaactacagcgccaggaacagagcttgaaatgcgagcaatgcggactccctgccgtgagcttatccacaagcccaagctccaatgatgctggcagtcaggcatactacaaatgtgtcccatgcaatcgcttcttaggcccttgccctcgcaacacatcaggagctagtcagtatggtgacagcgattctgaatcatcaggctcggaggaccatgtacctcgcggtctccccatcatttctacgaagaagcaaaagtccaacccacacccggctccggagttcgatgaggactgggaggcgaattgcagtccaggcttcatggtctcgagattcaaggcgcaaggcagggaagtgcttctctggccttgaagaatgatgcattttggttttttttgggaatagcgagcattgtttcatttaccaagtgtttatactcggtcgttacctgctaaggtgacgataagattcgagtaaaagtttatatatatcactaataaggctatgcctttgagctcggaatacagaatgtttgggtacctgcctatcagcgagattcatgaagttgcaaaatgtttacttctgggaaaacaaaactataaatccttcaacttcttttaaaagccaagtctttacctcaataagcttattccttctagagattctgaatattgctataacctatgacagattttctgggttcaatagcttgccaatgatctgaagctacagtcgcctacagtatcaagggcatcatcttcgatatgcactcagtacctctggtcatcgtcagagccgaaaatccagaaagcttcattgagctctgtatcccagaccatatcagcgctctcaaaacgaatttatattcaaacctcttgattttaactctttgcctattcgttcaaacatatttgggctgttgtcttgagccgtcaagtttatactcaaaacttattcaacgcaatttcatcatgagtactttcactttgtctcccctccatgaatattcatttgatctgcgaccatgatctctttctctttgctagatagagagttatcctagtttcaagtttcacctactcacctctctctcacctcacctcacctagcatcctccactttgtcaactttaccacctgcctatccccatcttcttattagtctaatcattttttgatcgcccagatggaagacggtacaagcaacgatggcaatcatttgcccgaatcacaccctgatacgactacaacctcgagcactcctaccattcccacgccctgtggtataggaaaaatatcaatcgagaacatagctctgcccgaatcaatcatcatctacttgaaccaggattccagcaccagattatggggatgctggacaggctgggcgctccagcaaaactaccagtcatccaccgtgcagcaagtcgacttgaagctctagctgcggtgtgcaactcgaactttgcagctagaatactactgcaatcaaccaatggaccgatttcggatatagatgccgtagctctgtgggcacaaaccatgcctgagctaccgcagccatccgaatattgggatgtcgtgttagccttcctcttgtcgaaagaggattgcatggcgctgcgggacgcacttcgattcgcagcaggcttacaggcattcaatgaatcactccaggagctagaagatggactggaaaaaaggctcttcatgcagctggcggataaatggtccgcgatgatttcagaggaagacagcatagaagacacggaggatgatattgaagacgacgtggggtaattctcagttggcacaattccattagactatcgcatttctacaatttagtgacctctccacgcataatcggttcatgtgtaactgtaatcacagtgtcttcctcctcgcttccttgttcctctgccatcgttatctttctattactccttttctccatgatcataatccaagtgacattaaacaaatataaaacactgattatcgtggcctataaagaagatgactgttagttcataagacgtgacaatgctgagaaacaatcatacccaaataaatcccccactacgaaggtgtatagcggccaacagccggatgcctgattttaatggttttatagcctaattaggactagctcttaccaattttagaccggcaggaaattaaaatacctgaattactatgacagatctcctagtaccaaattgagaacagcttgaaagttgaaacatgaagctattcatacccccccccccccccccccccccccccccccccatctnnnnnnnnnnnnnnnnnnnnnnnnnnnnnnnnnnnnnnnnnnnnnnnnnnnnnnnnnnnnnnnnnnnnnnnnnnnnnggttaaaaattggaaaaagaaagtttgcataccccccccccccccccccaaaatactatttctcatcgatcctaggcgttaaggccctccaactatatgaatctcctgtatttaaagccattcatacccgccgtagtcccgcactttcccggagaaaagctaatagcgcaactgacaccaaggcccaaaacggttggaaagccaagcctggatttcaacacaaagtccccattcctaccgaccgtataaacttcaaactctccgtatcctctggctccggcgtggcgaatatttgaatgtagttttgagaattaaaataggtagaaggcatttgaattaccccatggtaacagtttcgtctcttcgatgtgtacttacaaaagatggtattgagcggtgtcaaaggcggtctaaaactggtaagagctagtcccaattaggcgataaaaccattaaaatcaggcatccgactgttggccactatacaccttcgtaccccacggaaaccaggtgcttttgacacaggccaagctaccaacggcaccaccagactagtaatctccccaagacaattgtaggaagcaaaagtaatcgctctgacctccaaatccccagcaagtccctccgcagtccaggcgatcagtactggaagtgtcccgtaagaccatcccactgatatataagcgaagaacttgagaccatcggggatatcccaaattgcaagtaccaggttcgcgaaaatgcatagaatcccagacaagattataggctcagagcgagatccacgaatgtcagagtagaagctcatcatcaatgcgccagctaccgccgcgccattcgtgacagtggataagttgttcacaagagcgacgggatatttatttggctgagagtcgagccagagaataaatggtgtggcttcgctgtatgtcatgttgcagaagatgactagaaggagcacgaaggcgtagaatcgccacgatgtgaagattcgtttgatgattgttttgttgagacctgtagatggcttgaatccttcttcctgtagtcttttgttggcgagggctttttcttctgcgcttaggaagcgggattttgtgcgctctggcatgtcgggaaagattaggaatccgctgtgatatgttagttggatattagagacttttagggacttttcaataattccaattgcttacatcaaagcaatagggattgtgataattgtgcagataatgaaaagccatctgatcatagtaagtattggaatgcttgacatgcggtgggaaactgacctccaaccctgtaaaccatgatgattgttgagatgtgtatatgcagcagcttgtagatatcctgcaaacatctggccgatgggatttgcaatccagaaaagtgcattccgacgtcccagttcttccttcttataccatctgtacgcgcaagtcagcatgctttgaatttccgatagtcgggattcaacacgaacgaattgactacatggaccaagcccacataacatgaagtagcgctcaacccgacgaaaaatcgcattaccactagctgctcgtaagtttgcacaaacgccgttccgagagtgaaaagaccccaaaagatctccgcagctgggaggtagtattgcgctctatgggaaatatcagctggaagttttgtatggccatttacttaggttgcttacgggtatttgatcaagaccatgttgctggggatttgaaacacaacatatccaacttcatctggatagcaagcagggttagcacaacaatcaaactgccgttaattcattggagacaatagaaaaagggcaatgttcttacatgcagcatttatataattcaatctattccccgacagatcgagatcctgtttcatgccagaaacatatgcattagctattgaatgtcagtcaatgattctcgaaacatgcatgtgaggtacacatactcaatgccgaaacgtctagatacttgacaaaaaatgacaaacaggcatatggaagaaccagccaatccaactttcgaacaagttgacgttctaccaatggcatactggcagggaaccatcttgtggcgctctctatacgtgagactaagcgcgccattgttccgaaaggatgtgaaatcttttcgaacttggagaatcaatacgaaaccccggtctttgtatattttaacgaatatcatcttttgcatagatctaatctcgcgtcttttgtgagatatgaggccatatggcatcatacccctgacacgaataattgtcgccaggtaccgatatgttgattgcgccatatatcactaaaacaacaccacgagtatttcaaagcagactcaacggactcatatttcaatatctgtactcaattcaacctgtcggatgttttggcaagagtaaatgacgcgatcccgttgtagacaacgtattcggacttcttccgctctagaggggtagcaatgcttatctcgcttggcgagaaggcattctgatacgatgggttgagtattcgtgctttcttatagagatgacagcagatgagggttgagcggggttgctctcagctggagagataaataatatcgacatatagcgatatctggactttgaaaattgtcagagacatttgatctaaccgcatatatctaaaataaaatcaagtcttgagcttgataattttgaaatgtcagctgaaacctcaccacccaagcggcggatatacctcaatggcttcgacatgttcacggtaggccatctttccttcggacagtggaagaacccttccgatcggtcagccaccaagcgacgcgacctctcctactggacgaatctcgcccagatactggagaaaggcgatttcaatgcgttgttccttgccgacacctatggtctatatgacacgtacaaggggactgcagagcccgctattcgaaatggagctcaatatcccatgggagacccttcgatagtaagctagctgtctgatttttttcgatccagttgggttgctcatgatgtatcagccaatctctgcaatggcctcggtcaccaagaatctagggtttgcgatcaccacctctacttcatatgaagctccatacgttgtggcaaagaggttctcgactttagatcatttgaccggtggtcgattcgggtggaatattgtgacctcgtggaaggaatctgctgcaaaggccgtgagtattcacattggaggatttttgcccaagactgacatctatagctgggattgccactggtagatcacgataagcggtatgaaattgccgacgagtacctgaccgcattgtacaagtaagcaacagtgaaccctggatagccatacgaattactgacctgcaatagactgtgggagggcagctgggccgacgatgctctccaagagaatgctcaaacaggcgtgtatgccgacccaagtcgaatcaaatacatccatcaccacggcgagcattttcaattcgacggccctcacatcttggatccatccccgcagcgcacccctttcctcttccaggcaggcacatccccagcgggcgtcgccttcggcgcgaaacacgccgaaggaatctttgtctccgccccttcaccgcacatcctcgctccacgaattaaagccatccgcgaagaagccgccaagctcggccgagatcctaaatcagtgaaagtattcgccatcctcacgccgattgtaggccgaaccgacgaagaggcacaggcaaagtaccgcgaagcactagagtacgccagcgaagaagcaggacttgcattcttctctggtggaagcggtatcgatcttagccggtttgatcaagacacgcctattacaccgtcagatgtgcatgttgacgcccgtgttcattccacgatcaatacactctcctaccagagtcccgacgtgcctgaatggacgccaaggaatatcgggaaacacatctcgattggtggggctgggcccgttcctgttggttctgcgagtaccgtcgcagactttttggaggaatgggtccgtgtggcggatttggatgggtttaatattgggtatgtgcagacgcccgggactttcgaggatgttgttgagctcctggtgccggaattgaggagaaggggggtatacgcgccgttgggtgagagtggtacaatgcgagagagggtatatgggcccgggcaaaggcgcttgcgtgatgaccatgtcgggaagaagtacggatatgaggtgtatgatggccattagtctagtcacagggtggaatgcaatttagattggtctaatttgaaatgatcccgcgaaagcagatagatacatggatatacgtagtcgaggatcagggattttataccggatttgatgaattcacactcatttccactacttcgtactcaaacaaagaatgtcggagatcaacatagaaagaaaacagccaatttaaccctaaaaaagaagaaatgactctcagctaagccctcaggaatgtgccaaggcaaaccggagagatttcttccctcgcgccagctgaaagactctcccaccaaggggctggaatccatatggccaggtgaagatctatataattggcctgattctattgaggcttgacgctaatgccattagaatcgggtattttggacaatttcactgccaagtggattcgcacatatcatttcacgatgcacgtttcctgagattgaaattgagggcatattgacttcaccttagcgctttatagatctcaccttgtgtcaaattaattaatacgagaccggaaccccccgattggagcgaaaccattgcatcttgaactaaatcagcagatggcatcagttcactcgcagggggaatctccacaactggacggacaacatcgaggcgtttcttggcggtcgtttcatctttcccgtactcctccggactcatcctcctcaatttaatctcccatttgctttgaggcatcgctttgattggtccgatctgcgacagaacggggtctccaatttgcttggcttcgtttaacgtccccccgctagtggttcggtcagctcaggcgatctccagccttatgtctccggttccaatgtggaaatctgaaacagccccgatgcagggtatgcgccaaatacttctcaacgccatttccaagggagctataagtactagacatctactcatgatgttccccattctatcttcaccatctttcagtcgttccttttcctgacacttgctgggttcaagttgtctatcccttcatttctacacacacattcttttactacactcctttcaacttcaaccgattttaccaaaatgatgaactctacccaaacttccggctggcaggtcctagtgaccaagagaaagctcctggtatcctgcgttctgggcctcttcttccttgccatcgggatggacctccgagcagagctcggagctggacacaatcagaagaagatcctcaagcgtgacaccaccagcactagcgatgccaccatctggcagcctgcggcaggagtcaagtggcaaattcaacttgtcgacgccgtcgaagacaccagcgtcgatgccgacatctgggacatcgacctcttcgacaacaccgccgagacaatcaccactctccagggcaaaggccacaaggtcatctgctacttctctgctggcacgtatgaagactggcgttcagacattagcaagttcgacagcgcggacttcggcagcaacctcgatgactggccaggcgagcgctggctcaatatcaagtcgaccagtgttcgtgcgatcatgagctcgcggctggacatggcgcaacagaagggctgcgatggcgttgacccggacaatattgatgcatatgggaatgagaacggtctcgggttgacagaggctgactcgattgactttttgactttcctggcctcggaggcgcactcccgtggcatgtctatcgggttgaagaatggcggtgacattattggctctgttattgataagatgcagtggtcggtcaatgagcagtgtgccgagtacaacgagtgtgacgtctatgctgccttcacggatgtcaataagcctgttttccatattgaatattccgacgagactattgagtcggatagctctgacgatacttctgacactgccaccacgacttccactgatggcaaggctaccgccactgcaactgccactgttgctgtcatcccttcttctacctcagctaccgccgccgctgcaacagccactagtgtctctgtcatccctgcttctacctcagctaccgctgcttctgcaaccgccactagtctttctgtcatccctgcttctacctcagccgccgctgccgctgcaaccagcacggccgctgatgacaccaacgatgatgatgaagatgacgaagacgacgacgaagaggctagcaccgataatactaaggagaaaaaacaccgacacggtcacggacacggtaaccacaatctccgagctagagccgttctctcctccactttgaaaacatcagcttgcaacgcagccaacgccggcaagttctccactgttatcaagaacatgaacctcgatgcctgggttgaatattgctagactatcgattcctcgggggattgcttcgtatggcaagaaatcaatatgttagctggagatagtcgtgaataaatgactgtcgctattgtatacacttcaaagagacatcttagaatatatacaagacaagtgctacaattgagaaagaactcttgtctttattattggtctggtttgatgcgtagaagggctcagtactcagtatattgatgatgatggcgttgttctgtaggaggaatctcggtccggtggactaggctatatctaccatgaggggtcgcatacatagatatcagtcaattatcttcctcagaggacatcgcactttaacactaggttactcaactaagtaaaccctcaatattgcctgatactctggactgctttccacgcatcgccgctcaacatgacactacatgacgagagctctcaggaaccagagcagcttcctcgggagaactgggccatcacgccgagtggagaagggaactgttagatgtactaaggtctgttctgcgctgcgagtgcgagtgcgatgctgggcgccaggaataccggaatacctggatgctatcaatgtcgatgtacctatgtctcattctcaaactccactatactgacaaaagcttaggactacgagccgctaccaaacgtaaacccagcagtctccaggttgcttcatgcctcagttgaaatcgtccctttgatcttattgtcaataactgtcagagattctgcactgagattctgcagcgtcttgtgaacaatgggatggatagtaaccattctccagtacatgatccctccttacacaaacaaattctcagaaaccataaacttctcgtccctagcattggtttcctccggaatcacattagcatcctgaacctcgcaccccttcagcacagatccacgaccaatctgagctcggcgaccaatcacacacctggttaattgagccctagcctcaacaacgacgccctccatcaaaacgcaccgaatgatgcgggcagcactagcaatctggcagttcgcaccgatcacgctctctttaataacagcacccgatgcaacaattacattctcaccgagcagacaatccttctttgtaacgttgctgggcgaagccacgccttcggggtaggcaactttatgggcgtgtgctagaggcgacgccgccttgcgaccaacttcctcgatagaaggcagttttgcgaggaaaagggatgttgaaagcaagacgcctatgttatcgacccgtcgaatgaacggagttgatcctcggtggacgtaggctagaatttgcggcagttcgatggactggtgtaattgctctggctggagttcgcagctagaacgggtcctggtagtgctcatatccttgatgtcgattactttgtcaacgaatgcgccagtatagctgctttcgggcgtaaattctgtctcctgggtgaaagtggtgtcttcgttgaagttcttggtcaaccctagtttggcgccgagacctttctgccatgttgacttggcccaggcgccgaccagatcctccctaacggatttcagtttgctttggtggtggactaggtctttgacccaataggggaagacgtagacatgggcatcgcggaaggtggtgagtattctgatgcgcggacaattttggacaagggaatggcgaaggagaaggccttggtcttctttcattttctccttgattgtatccattggcattgacatgagaagtttggatagactgaaccgtgggattaacggtccatcggggccgtggacaacaggttcttcattctgctggagtggtgcaatagctatgaaatctgttccttctgcctgaatactctcctctcggtggtctgtttgatagtacacagccagaccaccggggcgagcttcccgctggcgatcgaagtaggaattggttggaggggatgcatgttgagtccgtcttgaatcactaccatcgttgagggcatacggactggaaatccacgcctcgaggattgactcaccggggatttcacagatgaggtcacaaggaaggagaagaaaattcgtggtgatacatctctggacttctgggagacgaaggagctcggcagttcccattgtcatctcgaggtccttcggtgcgatgagcgagaccgagggcgagtagaacgatgtaagatatgggttctggtccaaagcagcccgaaggggagggacagacagtggaggggtgatcaacgtgatatctgggatataattagccaatttgattaagagattgagatgggtctagaataaagagagcattcgggcttaccagtgacacctgatcgcctgcaaaaatcgatggcatagaataacataggtctgtttgcgacttgaatgaggcactttggatactcctcaggtctggaggtgaatgtattgagtgaacctccaggaccacataggatgagggcctggaagtccatgggaccagcgtgtggcatggttgtctgagtgaagggttaagcaagtgaggttaagaggtctttaaaatgtaattttccttgggatgagcgatcaatcgcgtgacatgtgtaagacggagagattgttgagaagtttggtagagggaagacggttcacaggaagagctgatgggggcagcctttaagagacaacaagtcacgtagttgcaattgaccggtcacgggtgaaaaagtctgaagttgtttgtttcataagtagccaaacctctgctccatcgaaatagataggtacatgacgaccgcctttcgggtggtcggtcatatcgatattgagttgtcaggcgggattaagtgaacggcaagactcattttgagtacgaccaagcattgatcttagacgatatagcttcggtgcctttttggtgcctttttagtgggtttgtaatagtttaacactctatattcaaggcttttatatgtccacaaccttcactcgcacaatgttttgccaagttctattttgctggtacccagagctatagtttgatattactaagatataaaactatttcccagttgatacgatttcctagagtgttgcagttttcaatcaaaatacaatatgggccgagtttatgctttgccccaaactttacagaatcagtacctgaaattaatgagctgatttggaaagaaaaataggaaaaggcaagaaaacagactaagcttttttatcaagatactggctctatatgcgttggttgagtaaaagacataaactgacgtatatagatcctcttcatataaatctcaagtgccatacccagaacaaggattgtctccccaaccatcatgcatcttcttcaatctcagcggctaattcgttctttcgatccttccgccagacaagccaccacgaagccagaatgcccgagatagccgcacacaggaagcaaagacagataacatatgacactcgatacgtcggtccaaacaccgtactgtatatatgaggcccagcgatgccactgaactgggccatggcattcgtcagcccaatacccatacccacggccactgtaccctcaagcgcacgaatacgttctggccagatgacagggtatgcagatcccgcacaagcggtagctacaatcaaagcgaggtatttgacgactgagttcttgactgtaatcaggatgatatagcagatgattgtcgtgctttcgactgatttgttgtcagtaggaactccatgtgtaatgcgggaattaatacttactcgcaacagcggtggtccagggtctgatccatcctttgtgtagtaaatacccgagaatattcaagaagaaaaagcatgcgacatatggaggctattgagtatgagtccggttagcgatgccttgcgtattggtgtgtttccctagattgattccaactcacaatattcatcagctgtgatagagcggttgtggtaaagccaagctcatagataacagtaggtagagcgtaattcactccaaatccgccaatgccatgtccaatccagtagattgtgaatgtgtacagggtcggacttgagagaagtgttttgaagtccccccagttccagcttttatcatttcctgagggtgctgtagaggatagacggcccttgaggaacgttctctcttcttcggtcaacattcgggcggtctcggggtagtccggaagaccgaataaagctaccacagatagcacgattgccggaaggccttcgatgacaaacagccatcgccagcctgaaagaccaccggccccatccataaagctgatggcatatgctagcagcccactcaatgcgccagatatttgaccgagagagtagaaaagggctatcctccagcgcagctcagatggcttgtaccagaatgccatgtggtagagcacagaaggatagaaaccggcttcagccagtccaattgcaaatcgtacacacatcatccccggaaagtcctttgcagcaccagcagcgcaggcgcagataccccagcccaaaatcaacacgaacatccatctcgaaggcgtggcgcgtttgagaagaatggtgttggtgggctcgaaaaagaggtagctgtaggagaagatggactgtgtccaggaccattgtgcggcgctgaaattgagctctttcttgattccagtgccggcttctaggttgatgattgcggcgttggagtagttgttggaatcaatgacacggaagatatatacaagcgagtaaaacccaacgagccagaaatctatttttcgtatcactctcttctcgagtttggcgttatattcattgtcttcgcgattgatctcattgggcggagttgaaggtatgctggaagtaatgacttccagctcgtcgcggtttcccgaagccccatttnnnnnnnnnnnnnnnnnnnnnnnnnnnnnnnnnnnnnnnnnnnnnnnnnnnnnnnnnnnnnnnnnnnnnnnnnnnnnnnnnnnnnnnnnnnnnnnnnnnnnnnnnnnnnnnnnnnnnnnnnnnnnnnnnnnnnnnnnnnnnnnnnnnnnnnnnnnnnnnnnnnnnnnnnnnnnnnnnnnnnngggtgtggaagttatgctgaaattaatccctcccagctcgtcgcgcttctccgaagccatattgtcaatttcaagatccgcttgatataggatgattgcttagaataatttcatctcattctgcagtcaaaacgcaacttattttccttgaagcacctttatgcttatgtgttacttggacccctccgttctcggcgacgcgggttattagggcaaggtgccatgatagtttggatcacgacatttcccctcccaatgtgaatattcgtttgattgaacctccattactcattattcattcggattgcggcatgcatagtctaaatgctataattgtggggtatggatattctcataacccccataagcttgacgcccatcatatataaatggacctcaaaataagagactaccttgaggtaccctatggtatggccttaataacttgctctgtactatttgatttttattgaagcagtcggtttcaatgtgtaactatgaaaatctaaggctcgcttaaggttttgcagagtatgtacaaaagcactcttactgacaaatcagacaggttaactagaccactgtgctgaccggaggcgacaaaaatgctcaggcgttgaagacctactctgcgattgtccaatcactggggtttttattatctcggggccttttggtggcttgtctaagctccatgctgagtggaggtggtctaaccggaactgtagcttagctatgccatttcttggtatctccgcactgtagccactcttacccactcatatacgtggggtccgaagacgtcttctgtccgcagccgttctggcagccttcgattgcaccaggccattcgtgatatccgccccgcttattcctgtcatcatcttgctcgtttggtcgtttaacgtggggattctattttatcaggagcagtgtcgtcgtgcagccaaaatttgttctttcaaagatgtagaaggattctagcgatgcctggctccgtttaatagtaggaaagtccatttggattggggcggtcgtcggatttgcaaatccctaggagttcggaggtgaaccgagcctcgtagagatatgtttcaggtcaacctgaccctttcctcggattctttcatttccagacgctgtctcatccagtttctcgtgctagctccttccgtgttctgatattcagtatgaggctacgcatgacagccggattttgccttgaagaaactagtagtttcctcgggtatgagtttaatgatttttgtatgaactcatggatatctgacaaggctgctaatgagaaataataaagctgccctcagatattttcttatactaccaaaggataggttgaagagaaaagcagagcactgaaggtagcccgattaggtcaattgtcgtggcgatcacaaaaccctcgtaatggaggattgcacaaacattgacaaatttggtctatcagacatgtctacgcacattcaaatgtgatacacaatccacggtctcaaattctattctattgagtcagagtttgattgactagttaactatgattcgaccccgtttcacggcacgataataccgttgcatataacgccatcctgagcgagcatgataccataaaccccgcatctttggaatagcaaagtgtatggcatagagcactataagagtacattatagataggttttattttgaattaggtatacaagtatactcttctcgcttaggatatcatccttcatccctatcctaaaacaaatatggctccctcagctatagaacaacaaatcccaaccgaaaaggccatcatcaaaccatggagccgacctgcacctactaatgagaaacttgattgggcaccactagttgagatcgacctttctcgtttcgacgaacccggcggcaaagaagagctcgcaaagcaattgtacgatgctgtgacacgagtcgggttttgggtagttgtcggacacggactcgacgacgagcgcatcctccgccagttcagtatcgggaatgaatttttcaaagagaatcttgaagaaaagcgaagcttcgaatgcaatttcgccgaaggcgagtatttcggctaccgtgaaaactcaaggtggattggagaaacgggcgtgaaagacaacatagaaatggtacgaatttacttcactatatcgtggattgaatttgactaacatgtccagctcaatattcccaaagctattccagaatgggatgatgttcccaaacacaggatcgtccgtcaaaactacgacgagattgccagcttccatcgagatcttttcgacaaggttgtccgcaagctgtttgtcttgatggcgattatcctggaattgccggaagaccacctagttcaggctcacgcctatgataagcgttccgatgaccacctgcgatacatgatctacaacacgcgcactcaagaggaatgggacaaggcacagggatataccaagggcggtcacacggactttggcagcttgacgctgctcttctcgcagcatgttgcgggtttgcagatccggacatcggatggggaatggaaatacgtgaagcctgtggaaggggggattacatgcaatattgctgacacgttatcgttccttaccaatggcaagtgctcctatcagttggtgcgaaaaatatctcgctaacatagggtgacaggtttcctcaaatcgacaattcatcgtgtcgttacacctcccagagatcagatcgatatcccccgccttgggttgctctacttctgtagaccgggtgatgacaccgtgatgagaaccgtgccctcgcctttgcttgaacgtcttggtcttctaaccgaagaagacaaaagccaaagcaagcctgctcctaccgggactgagtatgttcgagctcgggtgcgggatgttcatcataaaacggtgattgatcgtcgggaaaacacttcgtttgagttcaaaggactgaaagtgcccaactattataagtgatagattggtggtgatgagaggactgagtttaccaaattctatttccatgcctatttctgatagtgatgaggtggtgatagtatcaggagtcgagaaaaaaccagaagatgtagctggtgactctggtatatattacctcgtcgacaaggcatcatattatcgatatcatctgcgacaggtcatattcacgtggcatagacactttgtacagatgatatgagcaaaggataagatttctgtctagcctcaggcacatgacccaagcacatcagccacaaccccgcagtgagtcatgtatagaactgtaagagcctcagacaactcggtaattaaagtatgtcagagtgtggatatcatgatcttcgcagcctggtcaacgtggggtacctcactgaactgtccaactatgcttaatgaaataatacgatgtctcagtacatagtcatgcattctatattgatttcctggggactaagtaattgtttcagtgatatattcatattcaattcaattatctacctaatcccaagagtgggagctatctaagagtgtaaggctcacagccttgtcccgaaaagggcgcattccaacgcagcatatcaacgacaaaggaaaattgacaaaagaccaaatcgatcgagacaagcttctccacatcaaaatgagtcacagaaacagcagccaataaaggcagtaaaacgaaaaaaatacatgcatgaacatcgtcgactttccgcatccgtgattggccaatgtctccacacctgcacctccttccgggatgactgcagcaatgcgacttggccaagcctgcagataattgcacacaatcaaaacaattgatcgagtcacaatcaagtcggggtccgagactgggaggtcccgcaaatctgggaccccgacatgcactcgagtcaaagatcaaagctggaaaacagaaagtgaatttccgagggctcatccggcaggccctatcaatccagactatcaaagactagggtatggggggttggggttggggttggggtaggggtatgcctgtaatgtgctaattccacatcaccggtcaagaccgtctcgcggtcagatgggtgtgggcaatcaatgcccatcgcgagtgaattggggtttcttcaaagcgattgggttgggggttgtgtataatcgtaatcagaaaacagagtcggaataccttgccaggtacagacaggtatacgttcaacggtgcttgggggagccgtcaacgtaccaccgaggagtctcgtagtggcgctccacacgctcttgtcggtcagcgccgtacaatgacccacggctagaggatgggcggctgggagatccgccgggcgagcggtacatgatggaagtaggggaacgagaaaggcgaggggccctctcgacgagctggtaagtctcgggggacatggaacgaggacgagtctgcttgctgctgaccttgcgagctgtgacggtgtaggtccggtcatagctcgtggactgggtggtttcgactggttcctgaacgacaatgggcttctcgcggatacgcaagccttgctcgagggctgtgagaagctcgcgggcagcgaaggcatctgcgggcagcctcacccggattgacttgccactctcaaagtcaacagtagagaagtgctttccgctttggctgaagatgtagttgcgaagagtgcgggcgcgagtgttgcctgactcgcagagtgcgccaccatccttgtatgtctggacggcgtgagcgcagttgcggcaccggctggcgtggttctcaaagtcctggaccaccagcctctcatcggcatggagctcacgcacaagcgccagaggatctgttatctcgattggggcaggcattgtattggtgcggcgtagtccaagtaggcgtcgtttcagactaggacggggaggagatttctccgtagaagtcaaatgagtcgagcggtcaacggtatacgaggtcgagcggaagggcgacacggtgactgatttataagggtcacgcgaaagcggtaggtgatcaccgtatagagatgatcagatgtgaaattcaaggcaatgaattggaaagtgaagttcgaatgtatgtcaatgtatgccaatgtatgaatgtgtgtatactgaggaagatattctagagtaaaaggcagggggccctggtcattatatactgagtgagtatcatgcagagtctatagatggcgtcctggcgcctggagggtctggtgtctgctggtggggcctgagatctgcgatacctccgtggtacttggcccattcacgctaaacagacgggaaatgcaagtattattcttgtaatacgtctgctctgtattttccgtactggctgaggctgtgctttatgtttgtcatttgcttgattggccctgatcctcccaattcacagttaacttcaccacaacctacactatttccctttcagtccccgacactatttctaaggcttgatttagttgtatagcctgatccccatgacatcaactatcgggagagttttattacgcaagtcattcaccgaaaatcgtgtggctcatgtttctcgttttcctgcgtaatgacaagggtctcgtgccccctgttcccctcccccctgagaacaggcctcgagttcgcgtcatttgctaccctttgaacgtccaaggttgacactccgaaatagaatctcaagattcaaccagagccagtacattcggaaggaggtgtttcatcgcagtgtttccgcccactcattccccacgctcataggctcccgcaaccgcgatgagcgtctaccgagacaaatctggaactccctaaaccacttcaatgggactttgagcattgttctcttgttccatatttggagatactagagtgtttcaaactatctaagaatagtgcgcgaactcggattctttattttggaccccaatattcggggattctcaccagcctcaattacccctcccagctgcgagccgaaagatatacaacagctctcatccagtgctttttccagactatccccaatgtaggatgactgctcagcctcgaccactaacttcacaatctctgatctgtgattcgatacaccagccactgatgtcttctttcacggaaactgcttcctcacaatttatccctgtcgctacgccgctggcgttcaagccaagagtttctattcgatcacaaccttgttttcgatatgtttctatgtctccattcacgtcgcttggcgcgcgcgccaggctaccatttcttcgatgcatcctctttttccctccctgggcatcataagccacgttgttgataccatggggcccgagcctccgattgcgcgaccacctcaaagagattgttattttttcttactctgtttcaccaagcgccaacgagctgtctatccacagatcggccgtctattcatgaaccgtcacgagacgtccctcgtgtcaacatttacccgcaccctcgagattcatgttcccatactgaccgccgaccaaaatcatcgccccgagctaaccctgccgcagtgccaatatcacttgtactattgcaacctcattcaacagcccagccgggctagctcaatcggtagagcgtaagactcttaatcttaaggctgcgggttcgacccccgcgttcggctattcctaaaaccaaacctgagatttctggtttgtccgtggtcctcatcaacggagatggaggttgacgaaagaaaggagagttgagagaaagaaagggaaggaaagagggaatgatagtgtggggagggtaattatatatgtcggatgattttctgacaagagattattgaagaggtttgcgttgccatcaaatgtaccaacaccaggtacagtataatcaaattaaaatagcattcaagtagttatacaaccctatatgacagtgtcatatacagttatgcttctcaacgggctgcaggatgcgctaagaccgccacctgcatgtctatattctaccaaagaccttgtttccgtccatggagcactgtttcgctgctctcttcaacagcccggccgggctagctcaatcggtagagcgtaagactcttaatcttaaggctgcgggttcgacccccgcgttcggctattcctacaaaccaaacctgagatttctttttttttcgctgatcaaaattttctctttgagcctcctccgcccatacatgaagctgattggccgttgtagccatttggtccactagtgggtccggtcggtggcttgagaactgcctatgtacaacgtatgttttgtgtcttgcctgcatagtggatatcctgcgcatgaacaagcaactgtacttgtcaggtcacaagtattcatgcaggacaaaaattcttcaccgagtctgactagcaaggtcaaatcccggccgccatttgtggcttaactaggcccgagcgcaaggcagagaacgccttgtgctgataaagggtttttctccggctagacatgcatgatgtatcattggaaagtctatgtaggcattgacttcacctttgaaataaccacgccatttttcctatgattcgtcattaagaatcctacgttgccaagaaaaagctacaagaaaataacattgctgatatacatcgctacatgtagtggctgcatcatcgggccggtttttaatcgtgcccctaaacccaattccacatgattcctaaacagaactgatttagacccactatgttaactgcctacgacttcggagatatggcgagtatacaagctccaagtataccaccctagcatggcagcctacaacggattacaattccgagttgagagaaacataccgaaggcatttgccacccaggctaattgcaacagtgggataggctcgctacccctcaattgggtcgtctgccttgagtatcgctttgtcctcatctgaaatggttgacatgttgaatcttctagggaattctttttcttcgcttcccctctttcgtctgccgcggtagccttgattgaaagccatgagttgcctttttgccaatcacatcgctgctagagagggcacactatccaccgtgcaaactacagccttggatgtctgaccatgaacgccagtctgcatgttaatgtgtattgagtacagcgggagtgctatacgtgcttccctttgatacgttaccgaatgacaccaagattgatcattttaccaacggcctaccaacgtcgagaagtcctaatgatagaccccctacatcttttcataacagccgtaagtgttaatatggatgttcggtttatttacgagtacagagaatacacttactttacaggtgcgtacggtgtaccagcagctcatagaacatatctgcactaagaagtagtccgaaaatatctcagtgcttaggaagagaagcgatttttagaaaagctgaggaaaggtctcactgcctccacatgaaaatggcccgcttcatcggggatagggaaataataaggtagtcactgatctagaatcgtcggaaataccacgattgttttttggaatatctactttccggcgtggtggattactccatttggtttggatccccagaaaccataatggttgaaaccaaaagactgggtctctaaacgaaggcatgttccaatgtctagcatacatgggtaatgatcttgagttacaccttactaacatgaataaacgcatctgctgacatgaataggaatgagtccatcacgcaaggaaaacggcggaaatgcaggacacttccgtctatggcattgtcaccgatagtttccgctgggattttatccaaatccgcgctaacagcgaagtatgaaacctacgagacatactagaatgtcactaataaattatctagttcgtaactcgacgatacagatggaaaaagagcaaggctgagtttgtgtccgtcctctacgagattttcgagaccgccacatgttcctccgcccagcctcagtagcagcgcaagtgaaggagtaaagattcagacaccgaattcataactgagttgagaaaccactataggcacaaatggagtagaaatgttcgtgctttgcccgagaagccatcctgaaatatataatgactcgcccacaactgtgagcccgttttagatggctactatcccatgaatcgcaggactagcacccgtgtttacatgtagagtattgagggctatgccaatctcaagcttgaagtgatgatatccatgtacgagggcagtcacgtgagtgctgactcagggttatctcgaactcgtgggcttccctcaggagcggcgtctagccgctgggcaaccggggcggggcagtctttaatctcaaggttgatcaactccacttgttcataccctctccatttgttgacgtggccgaattcttcgattacatgtactccttccttagttttacctttaccacccacataaagtagctgtctatactgaattcttgatatgcatcggaagacgcaataatctgcccttcaacatgaacacaacgagtgacggcgaagctatggcggccaagaagcaaagaaccaccaagaagcaacgaaggaccaagaagggacggtacttcattcgttgtgcggtcgtaccgttatccgactcggtgacctcgttgtgaagtctggccacctccgcccccaggaaggggaaacacttcgtttcatcatagcaagtacgacgatccatataccttacattcatgatattcgctgggaagatggcaaagtcgatgctcttataatggtctatatgcctggcaagccgcttgataaagcgtgggatactttaagctctagtcagaagctctccattgccaataagctatattcctatttgaagcaacttcgtgagctgaaaggccactatattagggctattaattggggcaaagctattattggacgcattgcatcaattgaagggggtccatttgataccgaggcgcagttcaacgaatttattctaggagatttcgtcaagatagcaccagatatgctacgacattataccaaatttgcgcttatggatgaccatgagattgtattcacacattctgatttcgccccgcggaatattcttatggaagctggtcgagttacagctattctggactgggaatatgctggatggtatccagcacattgggaatattgtcaggctcttcgccaactgagaccaatgtttgactggccagaatatcttgcccgtattcttccgcccaaatttgagcgagaatatataggcatgactttcttagctcgtatctcacgtcactagttagctagatactgttgatattatgcagctacatacatagtcgcctactctaattcgggagccatgtatgatgcatccattgacccttcttgcctaaatactgcctcagcccgagcaacaatgtaaagaaaaaaagatcaaaaagaaatctcaggtttggttttaggaatagccgaacgcgggggtcgaacccgcagccttaagattaagagtcttacgctctaccgattgagctagcccggccgggctgttgaagagagcagcgaaacagtgctccatggacggaaacaaggtctttggtagaatatagacatgcaggtggcggtcttagcgcatcctgcagcccgttgagaagcataactgtatatgacactgtcatatagggttgtataactacttgaatgctattttaatttgattatactgtacctggtgttggtacatttgatggcaacgcaaacctcttcaataatctcttgtcatgagggcgatcagggtaggtggataattataccaagggcaataataccatttacggaagtagccgtcaagatataatcgtcggcttgttgatatcgagactgctagtgaggacttttccttgcggactgtggatgtcttatgttatgtaaatgttcggaaccgatcctctgttctgttgctagtgggactattcagttatccagagatattgcgacgtggcactagtgttgactgaaagaagaggagaccagatatattgagtttgcatgaatccaagtagcataaaatattcaagtattcaaattcatgagtttacctcccgacgctaatacgcaaaggggatgtgcgggtgaggtcatcacttgccctccgcaaaagtggcaccatctctcgagtctcaagtgcgatcacatcaaaagaaccatacatacatctcaaacacaaaatgacatctacccaacccttagagatgaaagcctggctctactccagcacagccaacggtcttgaaaagaacctctatttcgacgcctcagcacgcgcaccaccaaccgtccacggcaacaatgtcctagtcaaagtcctctcggcctccctgaatccagccgactacaaagtccccgagatgggattagtaggactagtagcacaaaaattcgtgatcggcacaccagcctcaccgggaatggacttctgcgggcgcgtggtggtcgccggcgatggcgcgaccgagttttcaccgggccagctcgtgttcggctgcctcagtaagcctgcccaattcggctcactgggtgagtacctagtggcatctgcaagtctgcttgcgcccgtgccagagggcgtggaggttgatcatgcggcgtccatcggtattgcgggacagacagcgtaccagtcccttgctgagtatgtcagtgccggcgataaggtttttatcaacggaggctctggaggatgtggaattttcgcgattcaaattgctaaggagatgggatgccatgttaccactacttgctcgacgaagaatgtggagttttgtcgtgggctgggcgctgatgaggttattgattactcagttgaggaggacttggttgctacgctgcgcggtcgtggtgttgtatttgatcatattgttgatcatattggataccctgcgccgatgtatcgcgagtcgcatcacttcttggcggctgggaagacatttgtgcaggttggcgcgccgggcgtggggacttttgttgataggttgatttggcctggtttcttgggtggtggaaagaggaaatatgttatcttcttctttacgaatacccgtgaagatcttgtgaaggtcggggaatgggtgcagaagggagctgtcaaaattcagctggattctacctacgagtttgaggatgctgttaaggcattcgagaagcttcgctcctcccgtgctagaggaaagattattgtgcatgtggccaaaccatgagttgagattgaatacaaatattgcgagtcgaagtggtctttttagggtttggcgagacaacctctccgcgccaaatcgggaaagtgtcacatctgagaaaggcatagtagcgagctccgacgtaaacttgacgatgtatctggctatgtgagtgaaatgaaatgggatttccctcttcctcatcgctaatattcaaaatcatcagttcaacggctttcttttgttcagtatgcaatatctattatttccttttctgggtatcttcggttgcattcctattgaaatccgcctgataatatgggaccatctcttctcgtccctccgcgaacaaccactcaaggatggcctgcataaagacaaacctcgatccattctttgcactagccgatatctctacaatgagatctcatcccatatattcagaaactctgagcagcacatctttatcagcccaatatataacgaagaaaattggatggtcatgcaattgaaatccagagttgtggacgttgagtgggcattcagtagtaaagcggacgccaaaaggcatttccagaacttcccccatccaaaaacgaagatgacggtacatatcagttgcccagatccatcagacccgggtcaaatggtgttgctttggcagaaactcaacttgctagtcgatcttctgatccccgtggctcggccgactatagagctggcaacgaatggaccgtggtgcgcagaagacccaccgactcactggggaatatacagagatcaattttatgagatggggggcctgcaggagtcaatccagtccggacccaaattccgtcctgaccacgaccttgccatgttacccttccttcgtctagggctatgggtccaagatccagaaacaaatgtgcccgcaatgtcagaccgtcatttcaaagacctattccagtccctcgtgtctctattcgatcaaaaagggatcgagcgccgattagagaggcttctcgctatcaccaaggacacagccgtccgccaaattggaaacgcactcaccgataccgacatgttcttagaaacctgcctggatgaactaccaggcagaacagccagcttccttcgtcttgaacgatacaaaaactggttcgaagatgggacaagctgggaatcgccgtatgagacacgaatgcgagaccaattatctacctgtccttgggttattatgaacacggatccttggctccatcgatcgaatcagagatacatcgttcttattctattacaccatttcatgtatgcgatgagagcaaatttgtgtgatggacttaggatttttgacgatgcaagaatatatacgacatgggactcggaattgtggtcgtattatttcccagatggcgtttcggagctcagccatatccaaacctggcttacgaggttctggtcccagaagtcccagtttcggaaattccatgcctatacggattggataggtcaacgacgggcggaagaaaatggagctgatgaatccagttgtgaatttatacaccgtttgagcttgtggggccattgaaggctgtcaaggttggatttatcggtgagtatcgaaggtaacagcatgcgtgtgaatctttggctcagttcgaactggacagtcattgttggttggaatattggaatctggtttatggtgcgagggaaactagctaaggaaactaacagatcatgttgtcactacaagttgtttattctatagttgagacagaatatcaaaggctcagcccattcttacggcaatagttgacaacttatacattgtatcagaggtgtatttgacagatgtgctcgactgtattataaaccccaagtcctcatctacagagcagaatgcttcaagggatcttctttcaaaggcgccgaataatcatcgtcgtccatatcaatcatttcaatccggtgggtcatcatgttctcctgagtctgcgcctcgaccttcttctgcaaccgtgcatcttccccaaagccctcctggctgttcagggcctcacgagcagcagatgattcccggtctttaacaccagccttgcgctcattctctaaccgctccttctcctgtcgcttatcctcatgggcaagagcagcttcttcgcgttcaatctcactgggatcaaggtcctgaagcccgataagggtaagaattctgccaagcagaaactgataccgcaggtggccactgatcagttcgcttacgttgaggttctcaacacctggaacaccttcaactggctgcaatcccgctacaccgagttgaaagctgcttgttcggtagaggaaagcgagtacagagtcattttcagagaacacgttcacaacacgtccgcttacaacactgcgaatcttttgccagtcctccgcgtttgaaggggtaggtgaccccatcaaaatgaccgattcgaccaggccatacgcgtctctcctttctaggcttttgaggcaggagaaaatcagccgagaccctagagaataccccatcaaggtcacgggtcgttctccctgggctctgttgatcagggcatcagcgaaaacctcgcccgctttatcggcgcgggctttagccacgctgaacgggttgtcgacgatgccagcaactttcatgaggcctaggggaagcattaccgcgctcatgatcgtgtggaagaaagtacgagccaaaacctcacgtccggcaaccgaccaagcagcgctagtcacaagagctgatatcgcgttacccaggttcatcaaaggctccatctcccagcgaagaccgaacacttcagagtcggcaccaatcacccgccatgggatcacgaagttcgactcttccttgacccaaccggtaacaccaatggtaacccgtaaacgatgatcttgtttagcagactccttctctttcacattccggcggggttctcctcgtatcggtatgaaggcaaagtcgtccacttcacgtgcgtacttttccatcatgcgaccagtcatacgtccaccgtaagcgccaaaaaggccaccaacaacgacgctacttccggccaaagtacctagaagcccagcagcagcggtagcgccaaggcccaatccgcccataacagttcccaggcccgccgctaccaatggagctgcgagtccgccagtgaggccaatcaaagcagctccagccacagatgcaaggcccactttccattttctcatgtcatcatttttctttggttgctccttggtatcttgatctgccgagagcgccaaagctgtctgcagcaatccgcgagcgacagtgacttcgtcttgattgagtatgttgatatctatgttcagactggatgtgacgttcaacatcaagactcttgagtaagcactgtagtgctctaggctgagcattaaaaggagaagcgagtgaagaataagcagtcttgttgcttttgggagttttgccaaaggtgtttccacggggtggtatatttcttgtaacttggccactctatctttatcctcgtccagtggaagatcatcagacttggcggcgttctgcaggtcttcgcctgcctttttttcctgatcatcatcatctttattgacgaccgcgccaacacgcaaaaggacagaatccctccaatcctcaaaagtggagagcgcacggatctttggccggggacttggctgtttgctagtagatccctgccgcggacttccagtgtttcctgacgcgtccttgtcttgtgggcttgagggcaagtgtggcgtgtcttcatcgcggtccgcccccggagatgggcgtggactggagtgattgggggaattatcctttgtatttgtatgctcataaagctctagaattcgaacccgcattgactcagctacctcagagacgaggacagttaagtcagcacgctgcgaccgatccaagatcgatgatagatcttgaccgcgatcgctttccgaagtattggattgcttagattcaaagaatcctccatgtttttctttgaaatttttgaacattggcgctgaatagaggtgaaaaaggagttgatgacttttcgaggagtaaacaggcagaaaccgatgttgttggagagggggcgatgtcgtcatggccccttactccgccaatggcctgaggcagaaacacctgacccatgttaagttgatatcactctgctttgcttcatgcggaatatttatgccttctgtatattcaatgccgtagaaagtcgagggagtaactcaattgccgatttcaacgacaaaaaatttcccctttgtctttgtcgcggacccgagcgcattcccatcccaagcggttccatccggatgattgtttttttcacctgggacacgctggatttttctccgtcgtccggacaccttttccttagctagggcctccttgagcctttcgattccaatggtttcctcttccatagcagcaggactttcgtcgcgaattctagccagcggcgcgacgccggtagtatcaacaagttggatctccttcacaaaatgaatttgagactcgagtgtatcaagcatagactgttcttcttcttggctggcaggctggggaagagccgagatgcgcagcagatgatggagttgtttcggcgtgattgacggtggcggttttgaagcgggattcgggaggagtgatctgacagaccagttcggcgcaccaagtaagaactcgatgtctgcactgtggcactttttggaagagtagaagcgacagaaggtcgtgttgagtcggggaggaccggggcgtagcgacttggatagccgagcagcagtgcgaagagaggtcattgcagagtctccgaggatgggaaatcctgctgtgggaagaatacagagaaagcagacgagcgaaatagaagcacagtctaatctgaacagcacagtgtaaaagtagtcataggttagcaccagggagcttaggcggatatcgagaaagaagtgacaccgcctccacgggcccgccgatcgatgctctcatcgataacaacctcatttgaccacgacactccaacttcacatcgaatatctgcggactactgcctattgcagggaaaacagacacatacactcaagatgactcaagatccccgtgtcctgctccaaaaagtaagcattcctccccaccttgcatgggcaatgacgatagtccgcatagctgactagacctcgcttgttgcgatgaaataggccgataaagcgctgtccggtgcctctagcggcttcggttggtttggaggaagaggagagaaatatgagagcgctgcagatctgtatacccaggctgcaaatgcgttccgagtacagaaaatgagtgagataccccgcggcctaactagttcgttgacttgccaaggggaagctagatgactgacctgcgttctcaaacagacaaggaggccggtctggcttttgagaaagctgcctccatccaaactcagagcctcaacgaacccgacgacgctgcaaataacctccaggaagcgttcaaggtctaccgcaagacagaccccgaggatgctgcccgtgtactttccagtgccatccagcactacgtactacgaggaaacctgcgccgcgcagcaacgcaacagcaatacctggctgaactgtatgaggtggaacttggagatatgaagaaggcgctagaggcgtacgagaaggctgccgattggttcgagggtgataatgctgaagcgtatgtatcccatgattttttttgatatctgtggattcggggaagtaactcggctaacatatactacaatgcagcctcgcaaacaagcactacctcaaggtggcggacctgtctgccctggaaagtgactattacaaagccatcaccaactacgaacgcatcgcccggagctctattaacaaccacctgatgaagtggtctgtgaaggattatcttttgaaggcaggcatctgccaccttgccacaaaagtatgttgtttccatcttattcttatagggaaacagagtattaattatttataggatcttgttgagactaaccgtgctttggaatcataccgagaactcgatccttcctttagttcgacaagagagcaccagctactcgtggacttgacccaggctgtcgagaatggtgaccaggaaggcttcgccgacaagctcttccagtttgaccagctcagcaaactagacaagtggaagacaaccctccttctgaggatcaagaataacattgaggaagctgaggaggacttctcgtaaatgacgattgatttcttcggtgattccccgcgcgtgatgtctagagaatattgactcttcggtttttggcttcttccttcgtttgtttatcttggaaatttctggtctgaaagtgaaaacagatcgatgctaccctcattggttatagtgtttttttttatctggccttattgtcacctagaaatatcaaatctcgaattcttgattatggacatttggatactactgttgagcgcggaatgcaagagtagaagattcgtaattcatcattctaagatgcctcagttctatatgtacttttttggggtgtctcatgcttccttcagaatcagcagagctgccctcatcatgtaatcagttcagtcaaatggtatcatatcatccacctccccagtgctattgaaatcaacagcttacgcagtaatggcatccaaagccttggatttgcgagggaacacgcgcttgtataaactgacacccacggagtcttgtgggttgatcttggcatcgaaggtagccttgaagtatccgtgtgtacccaggctctccttgaagtatccactgcggccacggcgggtccacaactggagtgccttgaaccactggatatcctcggcgttgaagaacatgtagcggatggtaacgaccttcttgtggatcttgtaggggtgaccagtgaggatggcacgcttggcaaccacgcgcttctgatcgggtgcgacaacagtaccggtaccgatcagttcgagttggtccagggcaatcggctcctccttggaatcagcggtctccatctcgtcgtcagcgtcctcctgctcggatttcttctgtttgaagacgagaataggaactgaaccccaagtcatgggtccaatccaggatgcgatggcactgcggccagggtgcaagtatcggtcgtacttgtgaacgttgttcggcgtgttatcagccgaggagaagatggggttgacgaccatgcggcgggctccgcactggacgacgagctgctccttagccttgaggggcttctccacgctggagttcagggtcatgctaacgttgaccacagtctgcttgtgctcatggcggagcagagagaagagagaaataggcttggggctgttgcgcaaaatggaaggaactgcgcgaaggtgaatatccacgcggacaccagggttaacgccgccggccaaagcctctcgaatgatgcggttcctggagcccttgacatcagcaaactgcaacagtcggcgccaatcctcgggctcgtagggacgatcctcggatgtttcccagtggctgagcttgaggttcttcaatcctcggaatcgggccaggcgttctctggcaagcgcgttggggtgcaattcaatttcatcggggaactccaagtcctcttcggcctcggtcttgcggctggcacgatagtcggccaattcctgggcttcgtcctctggagaggggtcaaggaacatctccgattgcgggtattcagtaccaccgccctcagtcatggcatcctggtggtctgggaacacgccatcttcgggtgctccagcagtatccatctccatgggctcatcctcatcctccatgtcggatccggagtctgagacgtcatcgagataccaagcagactgataatttgaggtacccatgggcaacttcttaggtaccgggggaatgtgcgagtcgtcatccgagaagtaatgatagtcatccagcagaacacccttcttttctgtctcagccatggaaaccatgtcgtcatccaccatttcaatttcttcgggagcgatagtagccatatcgtcctgatcctcagtcggagtatccagaatttgtgtggtctcatccgcgtcaacagccattgcgtcatcccgcttaggcttggtagttgtaagcggcgcagctgtgatggaatcaatctggaaatcgccccatccagggacatgaacgatccggtccgccttcaagccccttccacgaacaactccggtgatgacgacgtcgtctaccacttcctggttggactctggccactgaacattctcgacaaacatccagctgcgatcgtcccgccagcggatacccttgggagtagcagtgcagatagatctgatggcattagaagattcctgtctcgagtcgagagacataaccttctcaatagagggaaagaagtggttaatgaaagacttcaatgtagtagccacctgggggcgcttcttagggggttcaatcttgtcgagaccttgcacgacagccaacacatttgagataccctggccttgaatcgagcgcaacagcatctcgccctcctcatcaacctcaacttcagacgacatgaccaagatgacaaagtcggccatacggcacacatccagagcgctcatcaagtcatacttggcaggaacgtactgtacgctttgacggaatcgatcgatgcgcacacgggtaggcccatcgggcgagacatcagtcaagacatcgacgctctcattgatagaagcaatagcagcggcggcgtcaacatcggcggacaacggcacaattgcgacatgacgtggagcaccattctggccggcgaagacgctggtagcttgggatctttcctggtgcttcaacgcctgtctttggcgggcggtgttacggcgatcgagtttcgtcttaagttgttggtggggtgtcctacgaccgccccgctcatcaccttcgattttgcctgtaatagtataagcgttaaatttgcattatttaccatacttggacattttaaaatcatacctttggcctgatccttcaaggcgcttttggaggcatgcttagttttgtagggcttgtgggaaaccttggtggtggagcggtggtggtgcaccgtctgggcaggcgccatattggcgttggagcctttgaatcggaaagggagggattccagattgaagcgagtcagaggtaactcggcaaatatccagtcagagctatttataactggcaaatacacagaaataaaatcgaaagtgcctctagaaaaaaaaaagaggtaacgataagaaatcaaaattcgccagtggaggataagcgagcggtgagcgcaaatcttggcgaaattctgggcaaaacactttttttcttgaagctacgcttttcgtccgccctctgatcttcctcggttctttcgcaaacgaactcgagaaattgccataaaatggccgactcagcctccaacatggctgtcgccaagggcgatcatgaagccaaaatgagactcgcagcagccgagcaaacctacggacgaggcaaaggcgttaatgcgaagagtgcgcgggacaagaagctgcgcgcaaatctcaagagacaggaattcaagcacaaggaggctattcttcaagccaaggatgcagagattttgctcgagcacacggaaggattcctcgaaccagaaggtgaacttgagcggacatacaaagttcgccaagatgagattcgggacagcgtcggaatcgagacagcaaagaagggattcgaattgaagcttcccgatatgggcccctaccgcatggactactctcggaacggacgtgacctgctgttggcagggcggaagggacatgttgcgacaatggattggcgcgagggcaaattgggctgcgagttacagttgaacgagactgtgcgggatgcccgctggctgcataacaaccagttcttcgctgtggcgcagaagaagcacacttatatctacgaccaccagggaactgagattcactgtctgagcaagcacctagaacctctcttcctggaattcctgccatatcatttccttcttgcaagcgctgtgagtatcctcgcctctttgattccatagattccccgctaatcaaacctttgtatagcaaatgagcggccacctcaaatacacagatacctcaaccggccagaccgtcgctgagctacccacgcggttgggtaaacccaccgctctcgcacagaacccatggaatgccatcctccatgtcggacaccaaaatggagccgtgaccctttggtcacctaactctcaaacccctctcgtaaaggcactcgtgcatcagggacctgtccggtcactggcaatggatcgcacaggccattacatggtatctacaggtcaggaccaaaaaatgaatgtgtgggatatccgcatgtaccgcgaggtgcattcatactcatgctaccaacccggcgcatctgtggctatcagtgaccgcggcctgaccgcagtgggctggggcacccaaatgagcgtatggcgtggtcttttcgacgccgcgcaagccgaccaaggcaaagtgcagagcccatacatggcgtggggcggagacgggcagcgcatcgagaacgtgcgctggtgcccatacgaagatattcttggcgtaggacacgaccaaggattcgccagcgtcctcgtccccggcgccggtgagccaaacttcgactcgctcgaagccaacccttacgagaacgtgcgacagcgccaggagcaggaggtccacgcgctgctcaccaagctgcagccggatatgatctcgctcgatcccaacatcattggaaagctcgataccgtcaacgacaagaagtatcaggagcagcgcaacccggaccacaagcccgaagatcacatggagaagatcaagaaccggggtcgtggccgcaacagtgctctacgcaagtacctccgcaagaaggggggcaagaacgtcatcgacgagaagcgcgtcaaggccgagacgttgcgcaaggagtatgctgctcgcacaaaggacaagctcaagcaagagcgtcaggatcttgggccggctctgtcccggttcgccaaataagatcactgagtttgtttcttgcttgtgtgacatcttgtggagcagtagaggaacaacccccctctgcccaaaaccacccagatacccagcccacacgcggcttctgtgacatattggagatttggcgacagctgcattccaggcgttctcggggaatatgtttgtattcggacggaaaaagcagttaaatgtgtgtaccatcttttttcaacacattgaatatattgaacttcataactattttatacttcttaaacttccaattccacttcgtattccccttttgaagttttcaaggctatatatccaaaatcacaagttaccggacctaaacctaccagtctaaatagaacatctactcatcaagactcccagaccccctaacagccccatccttccacctctgcaaactaacctcataagctccactgcccttccaagcactaataatcaaattaacaatatgatccatccccttcccatgcttaacgaccgcaaacaccgtcggtcccccctccctcatcttcgccgcatctctctccatgacagcaagatctgctccaacagcttcagcaagatcaatcttgttcacaacaagcagatcagaccccgtgattcccggtccacccttacgaggcaccttatcaccacccgcaacgtcaatcacgtagatgatgaaatccgccagctcgcgcgagtagttcgcagccaggttgtcacccccggactcgatcagcaacaggtccgtcgtgaactgcttctgtagtttctgcagcgcgagcaggttcgcgctgatgtcttcgcgcaccgcggcgtgcgggcacccgcctgtttcgatggcgcggatgcgtgacggcgccagggctttgtggcgggttaggaattcggcgtcttctctgtttttcgagagaatgattaataatgttggtgaggtatggtaggtacgagtcttgttgtttcgggtgtgggtgtggggttggtaggtggggttagggtattctctcgtaccttgtgaagatatcgttcgtcactgcggcgatattatactcgtctcgaagggcgcgagatagcgctagcatcagggctgtcttgccggatcctacgggtctattcagatccaagactcatgtgttagtcactggctctgcatataggtgtggtgatttgaatggatatgcattggtataaagcaggtgaaatagaggttgattgcaggatagagaatggcaacatacccaccgataccaatagtgaaggcacgatccttccagtctcggccttcgatcaggggcatctcgcggttgacgtaggagcctgggccatcgaggatatcgtgtgcatggccgtggccgttgaaggggtcatcgtgaaagtggtcaatgccggcgtcgtgggagtgagagtgtgccattgttaagcttccaaggttgatagatgttaagaccaagtcagctcaggattgtttagagaaaagccaagatgaggggcagttctatcccttggaagggtgtggggaactgatatgataaaatgccgagccttcgatatcatcgattcgccgctcggtttgttcaaaagagggatactcttctgtaaattgctatttggggatttatgctggttggaatatttaagaaatatgcaaagatgtccccaagggagacatttcaacaaataatggaggactgcatatatagagagcccatacttcaataccttcatgtatacaaactacgatgcatcaatgaagattgaaaagcatgtatttatggattcgtcaagcagcggcagagagagtataagccccgagggggaagagatgtcaagccaaatggaccatagaacacccctatgcacgcagacgtagttcccaatgaaacgtaagagccggacgcctatcattcgccaaacacggatatcaatagttctgcctgttcacaagaagaagaaaatgaacagactgccaaggaaaaagcgaataatgggcaaaagtcgttaaatcccagacattgatggcaaaaggatgaaaatgaaacccgaacagtaaagagatagaaaacatgcaaggccaggaaataaacccgagccaacaaggaaacgctgaaaggaagatagagtacattaggtcggagttgagcaggatcgatgaggcctgacgctacttccaagcgaaggaagatgggaggggcctcaagcactgattaaatcccgtcgattgtgaattgagtcgtcatgtgccaaaaagcaagatagatctttcaggtagatgaaagacctagatgaggagtaaacaaacaagagcgggcgcgacatgcctcgcccaggtatccagtcgtacgccggtcccgtaccgcctgagacggcgaggaaaatgaacgcaagggaaagcaaaccaaactcccaacatgattaggcggcggcacccttttgtcgcttcggcacccgagggctagcctttactttcgctgagccctgctgcggagcaccgttagcttcgactccaccaccgtcctcggattccattttgacggtgctcgcccggcggcgtttgttgccacctacatttggactgttgttcacgccggctggggacggatgcattggtggttgcattccaggggggccggcaaggttgctttgggctgggctcggatgtgctgaaccagtcagatgaggcgagccttgctgcccggggagaccaagatgagccatggcaggcgaggcgaactgtgatggagcgcccatgctatgtccccgaacattttgcatgggttgcatgcctgggttcataccgggattcataccgggattcatgcctgggtgcatcgcgtgattcatgcccggactcatgcctgggtgcatcgcgtgatttatgcccggactcatgcctgggtgcatcgccggattcatgcctgggttcatgcctgggttcatgcctggattcatgcctgggttcatagctgggttcatacccggactcatgcccgggttcatgcccggattgatgcctggattcatgcctggattcatacccggattcataccctggttcatacccggattcatgttctggttcatgccctggttcatgcccggattcatgcccggattcatgcctggattcattcctggattcatgcctgggttcatgccctggttcatgggcatgggagtcgatacaaagccaggattgggattttgtgattggagggtgctgacaagattccgtaaagcgtcaggaggtgataactgcggatttgcctgagaaaactggaacaacatttgcatcgcagaaatggtttcagctacttccatgaatcccatgactggagttggcacgccgttggcagtcacttttgaatctggcaccaatgacggcgtttgcttaggctgggcacgttttgagttctttgtgaccttcggactttgcttttgggaatccgcctccatggccaacaacaacgaccgtggaatgaactcgttgtggctgacgacattaacatcgagcatctcaagcttgttgtgcatatcgaagtgcgcgcgcagcgtgccgttggtgaaaagctaaagcgatagatattagcaagctgaaaagaaaatgaccatgcgactagagatgtacctggcactcattcttgaaccaataaatgaatgaacattttggcgcttcaacgtaatgccctccattgtgggattcccgctcgcgagcaccttccaccaccatctgaatttgactaattccgctagtgaattgggtcaaataataacgtgccagtgcgggtgtcgcaatttcgaattgtttagatccaatcgtgttgttccaaacaccctgcctcaagacacctacaggggagtagaaccgctcgacaaacgattgccaatatagaagatcctgtgcttcattgcgggattggaagtttcccaaatgttcggcataggcatgaatggtcaatattgcgttattcttcctttgctgctgctgttgttgttgctgcatcataagagcattttggtgctgctgtgccttcatttgagcctcctgggccatcatctgctgattctgaggacccggctgatggccctgggaactctgagaaggctgcggctgcggctgcgggccagcctggccctgttgacccggctgttgagattgtggcaattgctgcggtgggggattaggagttccctggccttggggcaatccctgcgattgtggtggttgagtggatggcggctgagaagtttgagagggttgcggtgtgccgcctcctggcccgccatgttgcgactgtggggtggcactctgttcgtgcatattcggaggttgtgctgatgtacgctgcggggtatgctggcctgacggtccattattcccctgttgttgagcatattgagcctgctgagcctgctgcgcctgctgttgagcctgctgctgcgcctgctgctgagcctgctggatagcgaaaaattgctgctgctgttggagacttggcggctggccatgtggcatttgctgctgaaggtgcatcatattaacgggtcgcattccagggttcgcttgcattgcagccatttgcgcagcattaagtccttgagtaccattaggcattgatacgggaagaccctgttggtgttgatgttgttgttgttgctgctgttgctgttgctgctgttgttgttgctgctgctggtgctgctgttgctggtgttgctgctgctgctggtgctgttgctgctgctgttgttgctgctggtgctggagcatcattcgttgccgcattaattgttgctgttgctgttgctggtgctgatgtaatagatggggattattcgcaactatgcattgatcaggacgtaagtatgcgatcgagaaagacggctggaagagacgcgggtgtagcggggggaagaaatcaccgcagagggcagggaccgcgtgttccgtaacattacatctcgcaccccatgcgttaagcaaatagaagattgaatactaacaattttgttggaattgggggttctgaagcatatgcgcctgcgcgggattcaggtgggagagggcatgagcatttgggccggggccaccaggaccaactgccccagcgcccgggggcatgccgcccatcatcgggcccgcttggctgacttgaggtcctcccggcgcagagacgccaggatgcatttgctgtaccattccagcgcccgggtgtccatttggatgttgcgcggccattgggtgaccggggggaaacccatgttgcggcatgccttggtgggcaggaaacggctgcgtcatcatcattgctgagcgacgaagtcaccacaaatgggggacttcaaaatgatcgctcgcgatggcgaaaatgtggtgggcgaaacgtggcgtggagcgcgactggagtgggaagacaacaaggccgcttttagcgttcggggatggaccaagacgtagcgagcgacttgaaccggtattcagcagacgcgaggtgctgaagtatcgatcggggccaagtcactcacccgcgcaatgaatctgttttccttctgaaacaagtgagcggtcagtggggagtgataagagaagatgtcggggatgaaggttaaaagtgacgggggctaggggaggcgtggaggggctgggctctccgaacagtcagaatatctcaaagaggcacaactcacaagtgtttttgctaagggatctggatattagggggctaaaggtgttgcgaacgcccaggttgggaattaaggatgatcgcccggtgggagagagagaactggagacggaggatccgggtccgtatggtggaggatctaaccgagacgacagcgcgattaatccagagagaaacagtgatagagggaaaataaaggactataatgagatcaggaaattgtatagatcttaaagtataagctccatctttcaatcttcattttttccctttttgaggcttttttcttctccttcccctgctctgagtccaatcacacgctatcccgaatgaggatgggtcacgtggtgtcttcgcggctttttcttcacaactttttttttctcttctcttcttcttcatcttctcctttgtctttccttcttctttccaatgccatctttgaggcataccaccactactgtgaattcctattggctctgtggttctctacctcaggtttctggagctctcttaatgttgattgcgcctgactcatgaggatagcatgatccaatgccaacagtatcttacgatccctcaatctcaccactaacctgatagatcaggtgttagcaccttgtgcttaacgtgagtttacatcctttctcgttcttcctgcatttgcatttcctatccgttcaaggatgacaaaacactttacttcttaaccctccaattcgacaatgcggagataatccggacctcccttcccggttggtctgctacttgccagtatatcttgtctgagaacttttattttgcaatgcatctttatcatgtcttgtcttgagcaattaactaatattgttctcagtctagatcgaaacatgaaccacgatgcatagaaggatatcgcctgttgtaatggcgaattgatcaagtgacgaaaaatttctcggatgtaaactcacagacctgttctgaatgcgcaaaaccgtgtagagatttccgttgccttccttctgatgatcaattcgctattacacctgtgtgttgtctggatatatagttgtggaatacccgaatgaaactttattttgacttgaagaatgtctgtcttgtagtttataataagttcacacctaatcctgaatgaacatgtacaagtattctaccatactagttatctactcagtactccgtaagccttaacaatcgggtgaagattccttccgttgtagggttctgcgaggcctcggttctcccaaccctagcaggataatctcttttacgggtcaaatattacagtaaatgttgcggacgacaacttgaaagcttagactggcagacctaaagttgcgttaactaactagctaatggcctagatcttacttgggtgtataaggaatgcttcgccgatcaactacgccacgcagatcgcagctcgcagctcgaatatgtcaagttagtagagacattatatctgtgacaatctgagagtacgactttgcacttatagaggaaggagcgacttcctcgaacctaagcgagaaatcaccatttgcatggttcgctgaaagagcccgcagaaaatcagggagcagaactcgtagacagttaccctttcccttttcctctctgtacttagtattgtgatgaagaagcgctcattcttttgaatcgaactggcacataataatatctgtcacttctcttctcgcttcatgaaatcccctgttcgtaggctatgaccttgtacttaaagggcatatagtgactgctcgaccaaggcgttcattcaaacaaacttatagcgcagtcttctcccccctagagctaccgttcccggaggaccgagttatctgcaccctggtcactcatagaccatggttacatcgagagattggcggttcactgcatcttcgttcaagaacagattttatagctcctcaatcgtgatatctggtcgatcagactgacgatgcatatagaacctgaaatcgataggagaggatacttccctgggatagtattgttagggcaggatagggcgctactatctgcaggaggaatagaaaccattgggaaacgacctatcgtcgtacgcggaagtcttgaataaattggcaacgtatgcctggatgctcattggtatctgcgggctggagcaagacaatatcccgtactggaggcgatgacgagggccagaataaatgttgccagtgaaatcacatcggctcgcttggttctggcgctttctaggttgtagggagacacacccggggcattacaacactggccatgtaatatcgctctgggcttatccctcagcattggtagcgcttgtttttccttccgcgagaatgtcgggggttacggagtcaaggataatgaaacaatatttttcgatattgattggttggctagaggaagaaagagacaaagtaactatgataggggtttgaaccttcaataagtttgttcgaaatcccgaatcctggattagccgcgtatgtgagatcgagccgtactcacaaaggttgcaaaatgatgttgagatatacatgatatgtttgaggctgttcagaggtgaatgagaggttacatagtttgacgtagagtggtctatacatagaatatcgggcatatgtcctcgtacctctatggaaacaagacgtgatcaacagagccaagataattattgatgatgatctgaatactactaccccgtataatttctctaaatagcttcatggagacaaagggacaaaggcctgaaaagcaggaatatttcaaatgggcaaagggagatcttatagactgcatgccagcaagcaatacctcaatgcatcaaaatgtcaaaatgtcaatgtcatttgatctctagctgttgtggtcaagaaaccgaagactgttcataagtaccttttgtatgggaagcccatacaaaaggtacttttacattagtcgcgggggaacgcgcggagcgggtatgaaccttcagtgatcctcgactgaagaatcgtatgcccgcggattgaagatgtgtgcgtgatttgaaatttgagctcatagttctttttgtatatgtatggaacatgtataaattgtaccgacctcataacaccgaacctggctgacgaaaatatattatcacgtgactcctcatttctccttcgtagggtccggtagggaccctgtgccactcgcgatttggtgcatacatctattactctcggcgatatcgcataaagctccggtgacactgtcccggatgtattcgtcaatgcaacaagtccggctgtcggttgcacgcccttgtcgatttgtcgctcgccgccgctattccgcaccgctgtccgcgcgacgattccatctgtcacgaacatggctcgcatcaccgtctcaagaccctcacgatgccgagtctacagcgccggggaatattgtggaagatccttccctcaaacctgagaatatctccgacaatggcacgccggcgatatctccctccaccgaatcagcaaagtcgatcactaaaacctacggatctgctgtacgcagagcgatgcgaaaccgaaagtccccgcagcagactttgccatcaacgacgactgtacctgcatggttttatgagcataatacggtgtctcacagcagtgaagaccgccctacacaatcacaccaacaggttagaataaccaagtcagggctacaaaaggaactggaggaggtgaaaacagaggttcaagcttccgggggagattcggacccatctgcatccagtgataccccggcagcaacagagaatcggtatgcggtggccgaagaatcatgggaagagctgcaggcctccgtcaaagcaggcttgcggttaccagctgtgaaatatgccaaagagccttcggtaaagaagtcgcatctggcgctgcattacccgggtagtgatggtataccattcctagacgcggtggtgaagaagcttgcccaggagctgggcactgacctggtaactcttaatgcccaggacattgcacaattgttcagcgagcaagatctcgcagatgttggggtaacttcgcccattcgatctctcgggtatgatgtatatcggcaatcggccccaacttcatggtcagaacttgaagatcctgaaggagacggcgaggatgacatgactgaaattgcaggtggtccccgtggaatgcgtggcgatattggcacacctcggtttatcacaattgagagcagcaaagaggccggtgacattccgcttcctaactggcttgggctgaaaaccctcttggggggatcgattaatggccaaacggatccggatcccggggccggggcctcatcaagtggtcagcgtgctgaaactcggtggattcaactacttaatgagctcctcgggtcatcaggtcaaccagcactgtcagaccccactgagataacggcaaatgccgaaacgaaacctagcaagccttcgccaactcgagacctcattatgcatatccaggactaccgtgacattcagaacactcgggaggggtctaaattcatttcactcttgcacaaagtcattcaagatcggagagcggcagggtccaagattctgttgattggaactacttctcaggaaatccaccactcaccctcacaagatggtgctggtctgatgcaaaatgttctcgatgaccagttctcgaagaccttgttcattacccccgccatgagctcgaaagacgccgaaaaggtcttcgcagaagaccgaaagaagcgcaccatggagatcaacattcgccacttgcagacgatgcttcgcttccgattacatgaacaggctctgcctgtaaaagataacatcttaagcgaccgcgcttggccgctagagccttcaaccatcaaagaatcaggaatccaggatcggtactggtcgtacaatcaagtgcattggatctctacacttgcacttggctgcactgaagtcaacgaggcccttgggtttgagcacatccgacgtggaatcgagctcatggataaaagcgaccgagtcaccaatgaatggctgaaggagaagtcacccaagcagaaagattcggaagcggggcagaccagagagcagctgatcaactctttgcgcaaaacgtgcaacacgcacgagaaaaagctgcttaacggtgtagttgacgcaaaaagcattcgaaccacattcaacgatgtgcatgtgccccccgagaccatcgaggccctgaagaccctgacttccctttcactcatccgccccgaggcattcacttatggtgtccttgccaccgacaagatccccggccttctcttatacggacctccaggcaccggtaagacgctcctcgctaaagccgtagcccgcgagagtggagcaacagtcctcgaagtcagcgggtctgaagtgtacgacatgtacgtcggcgagggcgagaagaacgtgaaagcgattttcacgcttgcaaagaagctcagtccctgcgttgtcttcatcgacgaagcggatgccatcttctgctcgcgcaccggagccagcagccgtacctctcaccgcgaactgatcaaccaattcctgcgcgagtgggacggcatgaacgacctctcagcattcatcatggtcgctacaaaccgaccatttgatctggacgatgctgtcctccgccgtcttccccgccgtctactagtcgatctaccaaccgaggaagaccgcgaagctgtcttgagaatccacctcaaagaggaacagctcgaaccctccgtcgacattgctgaactcgcccgacgcactccgctgtactccggttccgatttgaagaatttatcggtggcggctgcactggcttgcgtgcgcgaggagaacgacgcagcggctaagcacacgggtgacgagccgtatagctatccagagcgccgcattctgactcgcgcacatttcgagcgcggaatggaagaaatcagcgcttcgatcagcgaggatatgtcttcgctgtcggcgattcggaagttcgacgagcagtatggtgaccggaagggtcgccggcagaagagccctgggtggggattcattcctggtgctagtggtgctgcttcggctgattcggcgcgtgtgcggacttgatttttgttttattcgaggttcctcgccggattggggaaatggggattccctttgtacttttagcgatactatagacctgtactattactcaaatgtatatactgccatccatttcttgggcaataaacatttgcattgtttctatccagatgccttcagatctagccttgaggtagtgactacgtggctatacctgcctgctagatttctaactgtaaacccaacacactttgtgcttgttatacgagtgtcgtttgcaaatcgcttggaatatttcttggcctttacatttggagtatgcctaatgcagcaaccctgatagagtaggcagagacattcgtgttgccaggttcctaccgctaaatttcaaagttctttttcttccttcatgatagaatatatcagcctaatcaggcagcatgtatagaaatagggatataaggcgagagaaattgctcccttctctgctcattgatctgatatatcctaactgcataagttcttctgttgcagcattaccagccccaatatgtcggtacgtggatctgctacaagcgctatatataagtactaacagcttgctttctgcagaatccatcggggtacatctacattcccagcaaaagcatccatggagaatgtgtcagctaaccaatgtatatcagtatttctatcgcagacgaatgcatgtctgcattcaatcaactccgatcaggaccagaggccaccaggcccaagttcatcatctacaagatctccgacaacaacaagagcgttgtggtcgaggaaacatccacggtgaaagactatgagttctttcgccggaagctgtcagctgcagtcgacaaagatggtaacccagcaccacggtatgccatctacgacatggagtatgatcttgggagcgaagggaagcggtaagagattaccccagagacttaatgagtgtagtggaataattttggctaattccaaaaccgtatgtgcagtaccaaggctgtcttcgtccattggggtccttgccatgcgtctatcaaggtaatttgtctttcaactcgcgtggccatgaaatgctgactgtcttggttgcagctgtccatgctctatgctagcagtgtgcaacaattcaaaagagcctttggcctcaacgtctctttttttgcagacagcctggaagagcttgaatgggcggttgtcttgaaggaggtcagtgggggccaggcatagatgggtctggggaaatgatcggcattgctaaagtcccgtgcatggagagggattgtttctctagagcaaagtaacaagatagaaatagtagtaggtgaggtgttggatatgaaatattgatttcgaactggcctttgagaacgtgctcaactagattttttgatatgccttggcaagggcaaatgtttgaagttgcatgatgccacatctgtactttcatcgaaccagctgccaaagttggtatagcgcgttctatcgacagggatttatagcaccaatggatttatagcactaacctggcgttgcgtcactccatatgttagattgaccaggcgaggtccctttctttcgatggtcttcaatcactttgtgttgcccattgtaagattataaacccagagtttagaacgagcgatatatatgttttagcaagatcagaattaaaacaaacagaccaaggacgaaagatatgtcaaaatgaaatgaaaatcaagggcaaaaagggtggaagcttgtatctccgcattggggcacgtgcgttatgacatgagtccgatcatcccgccaccctgactttgcaaagacctcccaaggttgcttgtttgcttgtttgctgctttgcatttcccaatttgcatctttcttccagttgagaacatcaggagtgcacggacaagcaagaaaaaccttcgggccaagcaagaaaaacttgctataaagctccccactttcccacccgagaaatccaccacatccatcgaatcgtgaaaatgatggccaccgggtctcgggacacctcggttcgtgaggccaaaggcttcgtcaaggatgtcgtacgaaatgactgggatttcgaggccggcgttccctccccgtcgtctgccgacggcaccctttgccacgaccgcgaagtgtgcgaatggcgggtccgagaattcgacaccccaacctcggaactcgagccacagagctcggacagcgagcaagagtatgatccatcagccgtgctgaacctcgccccgggagctgcaggtattgagcggcgtcgcaaacgccgtcgacagatagacgacgaaatggcatggaacgaagggctacgtttatggatggccaggcgcgatgcgtggtgtggtgcgaagactcggcggcagattcgggcggaggaggaaaagcgcgcgttggctggtgcacggacggacacaacagatcagcccgatggcgtggggctaggagaaaatggtgagactttgtctgattcaacccaaactgcgatgccgcctggccagggtagtgagggcattggtgcctctgatctagcagcccagaccgagacttcactttccattgcggaccgggagaaaagcgagcagctccagaatcgagcggatatgacctcgggacagcaagatgatcaggaggatggattgtctaccgcgccagacgagggagctaaacggaaggcctcgtcagagaccaacatcacagagccggatcagaaagttgccgcaatcgtacctactgaacttacaacctccccggccgtggaaggccaaacagaagaggagaaggtggaagaagaacttgatgaaccactttgccccgttgccccgccattcatttcaaacgacaacccaattcgcgcaaccatcaatcccgcaatctacccttcaatctacaccaaggtcgtcgtgcaaggcatgaccccaaccgtccccgtcaacctcgcccacttgaccaaagccatggttcaaggctggaaagcagacgggcagtggccgccaaagccagcagtgacatcgattgtccttgctgatgatgcctccgtgcccaagaaaaccacagaggacgcaccaccggccaggaggaagaatagcatcaccaatgccgtgaagaaagttttccattttggaacgcatcccttccatcgccgcggcagccaggacaccgcgggagccgggggcccgacggcttaagtggatcctactatttatggatcgtaagtaattgcatagccatcaacgctagtgcaggtcgaggaaatagcttcacctacctgggttgctctggcttcatcaggcgtctactctgggggttctattatgttttctttcgtgctcaaaatctgagcatgccgatgttttatttacttctagttctgcataatgaagaaatgccatctcaaaggttgtacatagtaaagtagttttcacaaattaggacctttttcgcgtcttcctgccgtctacttgagaatggggagaagatgtctaaaacctagaaagacatctaagaataccccaagtaattcagcctgtctgcagtatttctctaaaacaatcccaagacataatacataatattggatgttactacctagcagtcgagctactgacttccccagtgatcgacccaacatagacattgaagttataatgaacacagctatccttaacatccaaacttccttgcccactcagaatcgtctgtccattccgagtcacatggaaagattgagcaccaacccccatagtcacattcgaggtaacaatccccgctggaatatcaatgctaacaggagcattattcccactctgcacagtcaaggtagcgggattcgtcaacatagtagcgacaaaaatactatcactgagcatacccacacccaatggcgccgagagggtatcccccgtgcacacgacacccttgggtgtaggtcggtaccagtacacgacttcatctgcttccacggtaggggcttttgctccggatttgtaggctgcgatatacggcttgaacaggttgcgccagccgtcgtggggcatatcggctgcccactgggaagagccatcgtcgctgtgattggctgagtacgggccgatgtagtgggattcaccgtagtctatataactttggttaggagagacttttccggagaatttccaggatatgtaggatagatataccattccatgagattacctcaatcaggcctggctcaagggaaagcatctgttcccagcgtaatgttggcaggttctcgcaaacgaagacccagtttttagtgttgaagtgcgttgagaaccagggtgagacggctgtcatttaagttagtttactttcactcagagaccagaactaggttcaagggttgctaacgggccatgtaagtcttccctgcgagataatgaacaaatctatcatcccagatggtagtcatcgggccggggatgatactatttcccccatctgtaggccaagccaaccacgagaaggcaccatcagcgctctgagcagcatcggtggtagcttccgcgggatcttggagatttggcaatgcgtaaataggatttggtgttccttgcctcactgcatcccagttgaaactgtctccgacaaatgtacttaccaccgcagctcccttgtattgcatctgcgctgggtggcctgcatattgtttcatgtacgccgtgatcttttcggtatccccgttcgtccaataggcgaagtcgaaggagatgaatactttgaagtcaacttgctgggctgcttcataggctagggctagctgggttggggtgtagctgtctatgcttgcacagttcagtgcgaatgcgtcgatgccgatggattgggccgtggtcatgtcttctttccagtctgataactggtagttttctactataccgacctagatatataggatctatgtcaatggtgggaaataggaagtatccaggtgctagtatgctaaccatgaagtgggcgaagacatatttgtcttgcgattgactggtcaactctgaatccggagttgggatagctaaagctggcaggatatgtgccaacatagccacagtactaaagagggatttccagatcatcgctaaaagttgtaccagttcttaattgataagttgatttctcaatgatgtgaatttccgtccgtcccttaacagattatatagttcaccccctgcatatattatacgatattatacctcccaaatgcactgaattccaaccaaaatgaagcaagacaactaaaataccaatataaaccttgaacaataacctcaacggcgagtataaaacttgtttcacctttccccgcgctatattgtaacacccgaccttccgtcacatccacgtgagattgtgtagtattcgcaaaccgcgtccacttttgaattaaccctttgcccctgcagcatatggtatcgccgtcaggctcgggcccatatatcacgctctaaagaactcaatcaggtgttgagatgctacagtagtgctgagtatcacgagatgtattctcacatcaatctttacatgccaactgatcgaggcaaattaatatgccgggcatatgaaactcctgggtaaaactcgatgtatggattaacaccgatgccgccgtaaagtacatttgacaggtcttggcctgtggctttttcgctggcccatacgcatgactgaatttcggaatgactaaagaatatgtcatgcgtgaactgctattcaaatcacaatactatcagaacatgacacacgcattgtgctgttgtatttggtcatggtagcatcttgcagtcggcaggaacatcctccaatttgaagagaatgaatagcttctgatagagatgaggtcgtaataaggatgttgataacaacggaaatgatagtacaagatctctgatactaagattatggactcagaataatatatgacgtgttggatccgagacaggcaactcgggggttctgggtcatagcgatcaatggagattaaattccacggagattgcattccatactgacctgcatatccaggccagtcgagggtatgcggccctgattgatgttagactgtttgaactggactcgtttggcatagcccttgcataatgcatgattcggctccttctgaacattctcacctaagccgtcactaagagttgtcatgattatatctattggaggacctcgtacagtaaggaatgcattgaacccgaaggctatgactccattagagtaacaacattgtcaatatggcacagataacattattgattcctttttgatattcgtgacacgttaaactccccctaagaacgccgtgtatataaagatcgaacagaaataaccacaaggtcaagacaataactccagaaccgtcgcacgatcaacgaaacctctcgccgcatcttcgaaaaccttctgcgcttcactctgactagccactagaacagcaatctcaggctcgactttgatctcctgtaactcatgaccgggacgagtaaagtagtacttgtcctgatgacaagaccattttctgagatagagctggagatcattcgaggcgaggttgttagccgtactaaagagttccgttttcctgctatcagaggacggcggtgtagcagggaatatgacacgggcactgctcgacgacaagtctatgtctggatctgtgctctgtagacatctgctcacggcgttggcgaaatcgcggatccactcgatgtacgtgaaaatacccttccctgcaccagtgactcgatcgatgtaatctaccactggtaacactgaggagatcatgtctaggaaggcggcaagcatgactaaggttgtaggactttgcagacgatggcgacgggaggcgaccacacccagtgcttgacaggaggctcggcacacaacatcaatgatatcgatcacagaagacacacaggctggatccagagtgtctatgttacacagcaggtttttgaactccagtgtgatggtttggatgatgggacggctgaggatccaggcggcgcagttgggaagcgtcgcttcgagatacgctggaaacacgcattgcaagaggacggcgcggagagtaggtttgtcgtagtccccagcctcgtatgtgtgtttcatcgaggtgtgcaattgctcaactaggtagctctgttggccgtcaatggcagcacgctcggaaatgctctggacaaacccggtcaaggtctggatctctttgctggaagataacttcgactcgtagcgtttgagcttcgcaacaatgtagcgtgggtcggtagacggcaaggggaacgaagcagggtccgtaaagaagggatcgattggtttgatatcgctggtatgttgctgaaggaaaccgatgacgcgttgcacgaattcaacgtattctccttgagctgcctgcgctgttccattccctagctcttgatagttgcttttcatggaagtcatcacccgatgaagcatctcggagtactcctgttttgtcacggagaagttccgattcccagaaagctccataccatagagctgttcacgcatattagacgataggctcgagaggagagataggcgccgagagccaatttcctccaatgtgattgtataccggccaatcttcctatccttggagaacggaagattggcaagcaagggatctgtgggacttccattcaatagcgcctccgtgagacgatgttggaacttcaacatcgaggaacgctcgaccaatgatgacatccacatactcataacttggattcggcaatcagaaacaatctgcgcgtccttttcaatacatgtcgcaagaaacagcggtgcaaactttcttgtctgaactgtctgtcgaagccgcgtccatgaatcatcgccgaactcgctcagataattgtcccagtttcggaggccatggcgaatgagaacctgagcgattgacgtccagcattctactacgttgagaaggattgcatcctcgggacagtggtcctcgccaaagcagttggaaacaagacgagagacaatcggatggaaagccttctctacatgttcaataccttcaccaggggaactttgctggtcccagacagcctgaatggcatcccagtcaccgaactcctggctgtcctcatcagtattcactgccacaggagcactcgatgtggatgtagctggaacgtctttctgggtgtacgccactaggacctgcagagcctcagatacaacgacattcacgcgcgggagcttcgggttgaaaagtgcaagaagagactcgaaaggagttctcagaacaagcctgcgtgcatgctccattttcggagctagctgtacagcaatccgcagcccgctaagcgcattgctcagcaaagtctccacctgccgctggttctgggagattgtgcgttcaacaacctgctgagaaacccgattgtcgccggtattttgagcctcaatctctttgcgagcatatgaatgctgttgctgcagttctgtaacgaaataaccataccagtctccaaacggatcgagccccgaaacctcctcatcggtagaaagcttgaatcgaacaagccttgaccatgaccgcaaattgatgctgcacgcttcacgatgtgaagtggcaggatggaccagattgcgtatcgtctccagtcgagggcgacacccatcaggaacagcccagtacagggtgctgagaagatcgtgatgatttcttagtgcgtcaaggtcttcgtgctgcaatggctgttctttcgggtacacacggccatggttgggtaaaagacgccaggcaaagtttcgaatctttttcttgtcatatctctttgccaagaagcggagaccacttgctacgatcttgagaaatgtgtggaaacacggttctcccactcgggcatccagagaaggattgttatcaagttcgtcaaggaatgaaggtgagccccgagcttcttcgagtttcaagttgtggagggtattcttagcgaagaagtcgaataatgtatccaggatagctttgcattctctccaaccccaagaattgataagccgatgacatctgaggaacaaggttcgacagtagatgttgtatgaaatgggttgtgctttagagttagactcgaaatggtcgagggctggggcgagaagccgtttggctaatatccaattgtcattggcagctgtcaactggtaaccagggcgtgcaatcccaagcggatctatttcgttgagcggcaagaccgtaaacatgtcatgccatccagcctccaggctacccacatccctttcattgcgaatgattttgttgttgaaagtctcgagctggttatcttcaaagcagcccttgtagttctctgaactgcgtaaaagatgttttgtgatgacataagcctccgccgaaggatactcatcgcgaatccccgactcgcggcgttcaggctgattgatttccttaagcaatgttttgaactcagaaaaaccgacttttgacgcgatcaagcctgcaacatccttagcggatattttgacaatatccaaagcttcggttgcaatggcagggctaacgagccggtgagaagcaacttggtagatctggttcgagaaaaccatgttgaaacatgcaatcttgacgagcccgctcttgttgtattcgtcgctagtcagaaaggcagccagcgggtctctcacctggcagactagccccatcgctctggtgacaaactctgtacgatcaactgggtcggtgaaaaccagattttccgtgatgtatttgatcaacaatctgtataacctcgacgccacacctagagcagccgtaatgccagtctctggggaggtgacagcacttcgctcaacattatcgataatcacatcaaagacctgcccgatctctgatgatactgtatcgttccaacgactccattggaatgtctcgtctctgagctgaatggagaatgaagcggcatccccatcgaagtcccttcctgtgatttgcaacgaacgagaaaattccccgcttcctatgaatgtacttccatggaaaaatgtgttgtcacgtagggatggtactccgaagtcgaccggatagaagcgttgccagttgaaaagcccggcgacaccgaaagatggaggacgtacatctccaatgtgcgttatgataggaggttccaagtcatcggagactatggtagcaggatctggattctgacggaattcgtcggcatcgagattgattcgtttgggggggtgcttcttcaaccgccgtcgagatacagaggctttgggggttggcgtttgggttcttgcttcagccgaggcggcagcggcggcagcagcaacagaagcattcatgggcgaggaattgcctccagtactcaatgatccactgtcggagacatatcgatccaaagtcaagctgggcttgtaaggtttagatgtgcgctggtttttatagtgtcgattaagaagagacaatgactggttgaacatggcgggtaccattttctggcttctaccagggcctgccaaactagttgccgcaggcctaacggtgttcctcttcaaagatgttatgggcacattcctaggaataacccatgtgtgaccgtgctgctctagttttcgacgcgacgaggacacggccactggggtttggttcggtgggactgacactgcgctagattcgggtggtgcctgtacccgttcaggttccactgtgttggtgttcgaaacaccagtgtctgcctctgcatcgaggaattggttcggtatccggccgtttttagcattcgatttagctcgagcactgagaatcgaaagattcgttgtccaatgccggttttggggagctctggaacgtggcgggctaatcttggcttgccgaatagctccccttttccaatctcgcaaagactcatttgcatccactgtgtcctccctagaggccaatttcacgaacttctgagtagggctctgcctgcctccatctttacgtgagcgtggtcgtcttgtcgctaccctgagcagtcgcgattgctctttgcgaggcttcgtagcaacatctggcgcatccagtattcctattcttggtcgctggacggcagagggtttcttggtccttcgtgctccatacgaggcatcagtcattcgggtttgacgaggtctcttcggctgtctttccccattgggcaaactttgtttcgatttcggcctttttaaactgttccttttgtgccgagaacctgttgggttgcgcggaacagctgcagacatgtagtcgatgcggttatcctcggagatatcacccccttccagcgcgaagggatcttcgaggctaggagtgccagtcaacatctggctggattcattggctacagaggcatttcctagagcatcatttcgattgtcctcgtcgtccgaatcggaatctccaagatcaaacaagcctcttgcctgttgcgttgctggttgctttgagcgatcaccccttcgaatgagcttccgcgcaacaccctttccatccggtcgttgcgaagaagcatggcggtctaatttcaaggatttttcgttatcattcttctgattcagccgagcatgtgatgcagggagcgctccacggatcattcgttggaatcgtcgaatttcacgttcttcggcatctgacttggtttcttcttgatcactctggctgctggacgagatggactgtacttcctcctcgtcatctgtacccgcaccagctgattgaacctggccagcttcttgtatttcctgtgccccggactttgcaatttctcccggtggcgaccacccacgagggaaccgaaaccctccttctgaggcacgaggggttcttgaggtagacgataaacggcttgcgtgggggggactagacgacaagtcatagatggagacaccgttttgatttttagtaggtgtatttctgtccctaacaccacgaggtttggacggtttgtgtagattatgacgttctttgggagtcccggaatgagatgtcttctggcgctttgccaggcgagcttgcgatgaccgagtatgctctgagtcgtggtgttcccgtccttgcgtggcagattgtgggccacgatgccgttcatgtcttatcggcggaagatactcttccaagggaggacttgatgggagtgcatcgggatcatatgaatcttgcccttgactttcatcggtaacctgctgtctttcttgtggcggtcggccaaaaggcttgacgccccgcgcctgtagttgctgcgcaaatttgagctgttccagatgatatgggtgcatttggatggcattgcgctttcgaaatgttctttgcgcggcatgcggtaattctcgcaatacttcatcggggatatcaaggtgaggtaagacatcatcggggttggcatctagttcaacgagcactgcttgcggtagatctgcctccttatttatcggcgtttctgcttctacctccatcataccatctgcgtgtatctctgtggaatctttggccggcggagagccaaaggatgatggtagagaagataatggagagtcatcttccgaagcctcctgtggtggtagtggtggtggtagtggtggcgcctctattggttggacacgcttggccgcggtgtttttcttccgagttggctgaggggtcaacgccagctcgtcaggcgaggagctccgagtgcttggggtttcatcttgcgattgggacggccgtgtgggcttcaagggtttcggggtagactcgcggctcgagggcttcgattgaggcctgtcatgttcctgtgatgacgttgggaagtcgtatatgctggctgtattattcacggatgcattggtaatgtgcagctcgctgttacggtaattcgttgatttcgtagccgatgatcgaagtccgtaagtcttgcgcgctcttcttgggtttggtgtcttttcgtcatgcgcagcatttatgaggtggggacttgctcgattcgtgtgccgacgagcgacctcctctgtatctgagagtgtgatagagccattctcagcccgaacgtgctcgcgttgttccttcgtcacactcgtcgccccttccttcggtgacgatgaagggttgtcgatatattcgatattttcgaccacgggactattttcggcattgccattcttcgtatctaaagaatcgaagccgtcttcctcgtccgagtcagggacatatcctcgttgtcgccatgattccatttgcatcctcggcggggatcccccatatctctaaacagtcattgggcggtctcagggcgatgaaaacgtgagctaaataaacctcgggttaaaattcgcgaaacataaggaaacaaagcgtcgaaaatctattcaaactgtctgaatgcagggcgtttgatcctgacgcgtgccaacggagcaatttagcagacgcgccggctgctaatcagccaactgataaccgatcttttgcacctccgcaacctccgcaacttccccaactgcaaatctcgctggtctaccccaattcctccgaaatgagtcgcaatctcttccctgccattttcgctattggcgtgggggtcttcacaagtaattataccccacagcaagaatggtataagtcgctgaattgatccatctgctctaggctactatactttccaaccgacattccagcaacttcaatatgagagacagcagtctcagaagacctcgcctccgtctgatcctgttgctctgaagcaggacaccagtgccctcaccaaagctgactttcagcaagatcccaagtccactcaatgacgttaaccggccttccccttgaagtggcactgggctgatctgagtatctaattgggaagacagtcttccgcctcaggttgacctctcttacctctaccaccaggtaacctactccacttcatatatacctcaacattatgggagccaagtctactaagcaatgtgagtacatctcaatctcacattcctagtcaaaccaggattcaattttgatgatatactttcccaggccctgcacctcatcccactgccccagttgaatctcacgggtctttccacgataaatggtcagcttacgtccagagtcaagttgaccaaatttctctgaatttcgtcgtggtggaagcgaagagagagtcggcctttgctcaagggtttacccagtgcttggggtatatgggcgggtttgcatgctattaattagattagatgctatgaatctgactcattggaggcattggctttgtgcataggctttgtggaagagacaacaagcaagatttcactgtctatggcgacgatattgtcaaatggtagtctaacaacttagcttcttcatttgtaaacaagccatgcatctcgatgtctctgttacgtctcctggcagcttataggcccggaagctctattcaaagcttcctctttacgttcggttcaacatctaaacacctctcgtcgacacatcaacctccaggccacgcacctacaaacaatcaatcataggcatgattcattagatcataaatgccaacgagatgagatcattctagctattcctgtgcaggaagggaaagctttccgccgtcacgaattttgcccaatccttttagggcatcaaccgacgtctttcgaggtaagggcaaacaaaaaccagacgccggagtggaagaagtcgagtagttccatcaaacttcgataatacgtagttatttaactcgttagtatgattttcagcaggtatgtatatgatacatcgcagtgcatagcggccaaccactagggttttattgccaacataagattgtctattattgtagagatgcgatatgatttgctaggattagagcagccacggatcagcaagcagctgccttgcggtcatgcgctcttcgggtagccacttgagcatagacctaaggaaacggagaaacgatttcttttcacagtcggagagtcgcatttctagactttctagggagtcctgcggcacgaccgcgtcttcatgagcagtccaaatgcctgcgataattttagcacgagtcacatcctgttaattagaactgaatgctgagacggaggtctttaccattgcgatcaaaacactgccctgttgtttcactgcgctggataaaatcaggcggcggtggaccaatcaatgcgaccatcgacgcaagatgtttgaaggggtcatagttgccttcgtcatcgaaaatattcccaaatagatgtcgtccttcgaagagatcccaagtctaacctccattagcgggagtataagaaaggcttcaagcactactcgccaaggcacctatgttccaaatatcaacagcactccccaggtcatctcaaatatgatctctggggctctgtagatatcaggctgtacaaaaggccccgagttatgtgttttcccgatccttgcctctcctagatcacaaaggattggaagaccgaagcttttccctctcaacggtcggcggaattgtcgactttggtatatggtacgtgattcatctgtgctctttcgtgggatcgggtgcctgatctcttcatctgcaaaatcggccagcattgtagtctcctccaggctgagcattacattgtcggttttcagatctagttcacgttaggctagaattgattccctgtgttcgagaggagatgtaccagtgtgaacaatattcgcttcggtgtgtaaatagtcaagtgcgagtaataatcgcttaagcgtcattttgaggagaggtaggtcaaagggccttggatttagtctcatcatctccagaagtgtcatatgcatcggttgtaggacaagacaccggtgattgccagcatggccccgaagctcgaaggagtcatacatctcccgaagcatcgactgtcatgggtgtgataaattgatttttgcaaggtgctcgtaaacccgaaattcgcgatcggtcgcattagggagacctcaaagtgatgtagatacctttagtacgacatagctttggcttctgagctagtttagcggtaggttttcttaatctcgagtggtcacgtaccgaaaatcctgacatagccaactcgtggagtgggctccataaccaagcttgccggtgacccgatacctatcattgaatacctctccaatgcttacggggtagaattgcctcgggtcatagtgaggaagcgtctcctcgtcgatgagggtttccactggcaaactgacgaaggaccttctagaggtgggttgaaaggatcgatatgctattctggaggcagatatgaaggcgttcagtcgtgaagtcaagcgtgaagtcatgcctgacgtgggtatagcaaggagacaggagagcgttcatggcaaatgacagctcgattgccgcccttcataagaccaggagcacgatgtctggtcacatgatcctctgctagctgcatatagccttgaccttgacactgtccccgtgagtgtactgcagtccataagtgtggatgccctggctcaggaggcattgcagcgctgacgatgcaatatcgccctgagcatgggatacgatgtgctctcagtgcgtgctcattaatatatgcacaaagtagtgttaatcccaagtgtcttatactaggccagagccctagttctcctagtctcctcgtcgctaaattggcggccataaggcattatggcattaggttagggcagatcgtaacgtcttaatagggctatagtatatagcatcaagaaactgaggaagtgcctctcgcctgttcccaatgcaatatgctttattggagatcggctcttccccacattccaagcctggcgcacgcggcgccatatgtttcgctgggctacagtcgttcaggtattgtggccgttgtacatataagactggcacaacggcccgtttcgaagtactggtagatagtactgtagtgaggctttccgactgattggatataaaagccagttttctcggcaaatccatgtgtatctggaaatatttgaaacaaccgatgtattgcatgacctttaaaccttgacatctggaagatacatgttttgagcgccgttcgcagcacacgcagaaaatcaaccctagtcccttgcaatgataatgtagtccattcccgaataccttaacagaaaatccccccataagcgccaatttattgtagtttctgcatgtaaatcaaacttcttcaaccattttccctgcaggaactgtaggtgcaccgaacacacgcccagtaggtgtccccagccattcttctggcacggccactttacagccatttgaaccgctgatccagcgcgccatggtagggtcggctttatcggcctccgcgccttcttggccgggggtgccatcggcggcctcggcagcagcagctcgaccacgccgcttaggggcctgcttctttagcagtcgatttattgtgtccatctgttgatcaaaattagcggccgttctccaatggatatctcgaaggactttttgcgcataccttctcctcttcgttccgcttctcacttaggttcttccttcgccgcgccatctctgcacgacgcatctggcgctcctcggcagtcaaatgcttcttgacctggggctctatttttttagttagcttcggtttggacaaatggttgatcgtagtttcccacccatgggaagttgcaagaaatcattccccagatttcctcgctggcgcttggtggttttgccactttgcatagcgagagcatcactatccatgtcatcctctattccatcatcatcgtcgagttcatctagatcatcaacgttgacgtctgggactgcactttcatcctgatcttcaccctcggcttcggcatcttcatccgtatcggagatgggctcttcctcgtcttcttcttcctcttcgtcttcgtcttcttccattttgatctccttggcctccacactcttgggcggcttggcgcgagagggaggggtgtttttaccgcgcctggtaggcgcctgaggctgcacgtcatccatatcgatgtcaccatcagcgtcagcatcagcatcgtcatcgtcatcgtcgtctccaggtgcatcttcatcatcaacttcgtcctcttcttggtcgtcgatttcttcttcgtcgcttgtagcaacttctacaatcttctttcggttccgactggagcggggtcccgagacaataggatcatcccgaaacacattgactgagcgccgtccagcagagcggccagcacccgtagcttcccgcaatttgctagaggccattttgagagtaagccggagagatctctttcgatcccctgaattcaatgaagatcgagagatggaaactagagcagacgcggaaacagatgcgcgagtttgtctggtagacctggtggccatgttagcctctggctctggggattcatcatgtgcctttcgcgatcgaagggatcgacggggcgacatggtggcggttttatcgagtgtgacagaagtcgttgggaagggaaaaatgcaaaaagcagaacagcaaaaggaagcgggagaaggagggtaagtgtgtggcagtaggaacttaagccattaagcctttggcgagaggggaaggtctggagagagaaagagggagagagagggaaggagggatgtccaatcacttcatccactgagtgagacgcggagttgcaaaccgggaagatacagattgcttttctatacgggatgtttccactgcgaacaaagcgccgttacagggaatcaggcttggggttgtttctcctggcttctcttgggggcgtgtttgggggctaaccccgggcttgggcagatcggaaggcacacaaaaacaacaagatcaacgggggaaaacgccatactcacaagtacttttctctaaggtttcagattctccagatgtccagtcgctgacgctggatgaacgaatgaagtactgcacggtccattctgccgggcggtatcgagtatatacggatgccattatggaggattgtggtgatctttcggtattcaattgatctcgctagatataatgtataaggacttattgtagaagacactatagccgtcaatagaacccgaaagtcaggtggtatggcttcgtctcacatacaggctattttcggtgaacaaggtactttggatattcacatctagcgccctaaatacatttaaaatacaatatttgccattcatattagattattcttcaatatcatattctagtacaacgtgaacaattatcaatgtgatctcaagatgtacatgtagttatggcaaatatcaatgcctgaggtgtactcggccttggaacagccgaggtcgggctcacatggcaagtccggggaaggttccgtctcctctttacaacaccaacgcctttgctttctcatatctctggcaaatgtgtcagatacctcatcatgcctgacgacacatctaaaacagcatctattccctcatggcagaggcccaataagacggccgaggagtcgccatcgccgacctccgacgatgcgcccgcaactacagccacacctcgacaaactctcctagaccaagcatccaaatttctagaagacgagtcaatccgcgatgcaccaacagagcgcaaaatctcattcctcgagtcgaaaggcttgagctcagacgatatcgagcaggtcctcggcgtctcccgcaatgcagagacgagcagcagttcaaccgcacccaaggacaagacaccggaagagacaccatctgcctcgcccactcaatctgaagctaccccttctcctcctagcacctcctcgccaccctccaacaccatgcctcaatcgcgcccagcaccagcgccaacccccgcctcccgcgacgtccccccaataatcacctaccccgaattcctcttcgagtcatccaagccgccgccactcgtgacaatgcgtagcctcctgtacacactatacggcgccgcaggcctaggagcaaccctctacggcgcaagcgagtacctcgtgaaaccaatgctagcgagcctaacaagcgcacggcacgagctcgccagcacagcagaagcgaatctgcaaaagctaaacgacaagctagagaagacagtatccgtgatcccggcggagttaacggcgcgcaagagcaaggcctacagcgacgaagaagacgacgcctcgtccatcacctcggacccaaccgagctgttccacagggacgtcgcaacacagacgagtccagagccaactccagtacccagcactactggcccggtggactcggcacccatctccccatctacggcggtcaataaccacgtcagccgcgttgagtctattacctcgaagctgcgcgagatcatcgactcggagaagggggcgagtacgctggatgactcgatgagtacacgtctcgcggatctgcatcgttattgtgacgggttgatttacagtgctcctgcgtactcttctgggtcgacgtacggggtttggaataccaataactcgggctcgagtgaaagcgctggtctgcggaagggggaggacgaggctattgctgggttcagggctgatattcgcggtgtgaagggtgccttgttgagtgcgcgtaacttccctactagtcggggtggacgtcttcccatcggtggacggtgatggggcatcgtggggttttggtgcgactgtacgaatgtacgaatgtatatagattgcaacggattttctaagtggtttacttaggtatacctaggtttatacagtctgtatcttcattcatttgattgcatctactagattataacgagggtgctaggatatatattatcatgatctgtaatgcgaaagccatatcctcatttgattcatgtctatctagcagtctgtgtcagaaggtaccatatagcgaaataaccgaccatactcaagaaacgtcggaaatatttcgctttgctcatgatcagacttatgccgcaggggagaagaggaacggaggaaaatacgcaagacattaatataaaatggacaaggaagatgagaaaatttcaagcaacgctgaagtatagagaaaaaaggccagaaatacataagttataccgcctttaacattccctcaacttgacaagaatcaaatgtgtcatttacggagtagcgccgctcatactaatcagtcgcttcacaccgacctgttgttatacttgttagtgaccgaccgtttagtatcctaggaccaaagttcactcaccatccaattgccacattcgtcagtccggttggtcatgatatcaacatgaatagcgagggcggtattgtaatcacgttgctggagtgcacgggccaagttggccatgtcctcgatggtgttcggcttgagcaagtcctcgttgttgaggtgatcaaagaggatgttcaagcggcgctcggcatcatcaacctgtaccttgaatgccgcgggggcccggctcttgacgcgctgcatgtctgctgatagaatctcgaagacaggctgtgcgtttgcaggaatatgtgaacggtcaccgggggctggaataagggtcaattggctggaagtaattgtttgttaagtggtattactcacgatactttggagccgccggagttggcctctgcgactgggctgttggaggtcgaggtacttgagacggcggcgggatgccctgggccataggtggaggctgtgtagcaataggcgtggtgggtccgtatgggtttgccgcggggggttgtgagaccgcttgtggggcgtatggtgaggcaacggcctggggagggggagccaccgggccacgagtgtgcagttgcgggtttgcagcctgggcagctgggctcggtgcataccgattggttgggggtggtatactaggaggagcattgtagggcgacgctccgcgggggatggatgccgagggacccatggttgacccctgagccaacgacggtgactgagggagagaagcgtatggattggcagggggcggcggggaacgcccagggacctgcccaccggatagcggcgacatcatacgcggtggaggcaccgaacccgcctttggtgggggaggcacggatggtgcgcgcggagcaccaaccgggggaggtccctggaccaggttcggtgactggttggggaaaggagaggcgatgggtgcagaggctgcggcaggagttgaacggcgaggtgcaggagccttcgcaaagccttctggcaaatcattccatgcaggaaggccagtggccgtggtgtatgttgtgattgtgttggctggcgactggttagatgacgcacgaggaggtggaggaacaccagcacccgtgggctgttgtccgccgaatgcagatggtggagtataactggtaggtctcatgccttgagttggctgatacccagttgtcgatccgtaggcgcctcccgtcgacatagcagcgtaggggttgctgggctgagctaccgaggtcgttggagggccatatgggttagcctgctgggaaacagcgggcgcagtaggcgtataaatgttaggagcagcaaccggtgttgaagtagcagcaggattgtaagcctgctgcggctggtataaactgggctgttgcgggaggggcttgaaggcaggtttggctccgacagaggcttgggccttctggggtgcctgtctggtggcaagcttgatgcggttgcgcgccacctcagcttcagggtgcttttcagggacaaggtcaaggtacttctgagcaatttgcaaacgtccatgggtagcgacaacatcggcatattcaatgtacttgtcatacaagacactcaagcgccaatccgagtccttgttccgctctgtatcctggaacttggtgacttggcggaagatggtaactttctcgatcagaccctgtagagcacggacatggatagagaaggaagagttgtcggtgttgctttcaattcctttctgctcattctcgcgaagctcctcgacccaaatgttaacaaccttctcaagcttcgagcctgctaaaaagcagaaagaagcatccttgcgggcgctcttatcgtcgctgttctggacctgctcctctaggcggtcaccaagagcatcacagagatcagggaattccttctcgtcggcgaaggtacacaaggcagccataacttccttccagttggacaaatcggcattatgcaccacatcccacaggttcttaccgacaatagatgcgagcaagcgcatatagttcggaccgccggcctgcttagagaagtagtactcctgtgccttttcaatgcattttgggccgccgcaaatagcaatcatgaaagcatcggacatcttatcctcccggagggcaacgtccagagctttctcaaactctccaaggagcaaagcccgagtaatttgcttttcagcctggctttctgaaccattgaaaatttggaatgggttgttggtttgagcacccttagaagcagccagttcagaaaggaagctgtcaccttcgggattgggatcgaacatggattgcaaacgcttgtgcttcttaaccttagccggtttggcggcggcaccgttagtgtcctcgccttccttcttgtccaagccaagctgcgcgagactatcggcggcctcatcagcctgatcctgaaatcccaggtactccatcaagtccttacgtgggttttcggaaattaaagcctccatcaccttccagtctgctttttctgcttcgttggaagcacctgaagcgcgcgactcacagagagtacgaatatcgccctctttcaacgcagtctcaaagctttcagtagcattgccaacgctctcatcaacctcgaacgatgtgattttgacagtagatgtacgtgagcccttctcagtcagaccgaaggaaacgacccgacctccgaagccaaatgtagcaccacagggccgctcaagccagcgaggggcctttgggagagagaacttggagacctggggctgcgtttgcgccttattaaagaagtcttcgccgtccaaggcttgattgtgatcggcgatggcctgggaattatcggtcttcgtgttctgcagggtctggatacaaatcttgccatcaaaggacgcggttgcgaagaagttcgggttgtgggggttccagcgggtctggaaggtccagttcgtgacaacggggaactctccgtatgcttcaccggtttgcgggttccaacagatattacggttatctttgccgcaagacagcaggagatctggatcatgctcgcaccaagaaagcgagagcacaccggattcgtggccggtgagtgtctatacaaataatatcagtattaagtcacatctgggctctgatagagtaacctacccgctccggggcgtgggagttgcgcagatcccagacatagagcactgggtctgactccagcggtgacgatgtaataagctttgtgggctagacgtgaaaacggtcagcaatcctggaataactacgtgggaagtgctaacgtaccctctcggggtcccatgcgactgcgctgacagccttccgggccttgttgttcagtgtcagactctcttttttcgtcttgacatcccagaccgtcacgaagccggagctgctaccagtgacaagaatgtgaggaaccttcctgttccaatccaagcagtcgatatcatctgtgcgggccgcgttgttgcccaaccggaatgggttctcgatgttgtttagatcccagatgaacagctatccagcaattagccacatattcaacctatcctcaaaccgcagcctacctctccctttgcgccaccggttgccagaaggttcgggtgtttcgggttgaactgaagggtcttgatggcgccgctgtgcttagtggttcttgagatcaacgcatcactgaaattgaacgattagcaaatgtcaccgggatctggttcgtatgtagagttcgaccaacctggatccagcaagtagcttatcagcatcccacaactccagggagccattctccaagccacccgcaatcacaccccgtttgttgtcttcggacgttgtccaggccacatcattgaagctagttacattaatcggtcagcatgctcatctccattcaagttcctaaaagcacgcttacccagactctgtatcgagcttagctatgggctgcagctcctcgctcgcatcttcacggtcaaggcccaaatcccacagttcgaggcatgtcttgttagagaagtcggcatcgacagcgccagcgcgagttccagttgcgatcaatggcgacgcagcgccaggcgaccaggcgaacgtggccgtccttgggatttccctcagacgcaccatgatgatggcaggggaggtatgttttggtgaggatcgagaccaatggagtatgtgaaaggtatcacccgaggaatagtgaaacccaaataaatagaaagaagagggatcaagaaccaccccttatgaataattgacaatggggtgatactctagatgttccaagtatagcagtaaccaagtggcctcctggacttggagggaccggggaacgcgcgctagaccgcttttagactcgccaaaacacctggcacttctccgaggtgagctgcacgtgatatcaatctttcggtctggtttgatagcaacgtacagcttggtttcagagtcttgaacaaaagttttttttgccgttgaactccctttcccctcacatcttctactatccgtgcaatctcggcacatagccgcccaaatcaaagatcccccaatttgacccgaaccgcaactacacataatgagcgaaaccacgcggctcaagagcaccgtctacgtgggaggtcttgaccaaggggtgaccacgctcacacttgcggaggcttttgttccatttggtgaagttgttgatatctcgctgcccaaaccggaccaacccaactcggccgaagttcaccgcggatttggatatgtggaatttgatctgccgcaggacgctaaagaggcaatcgacaatatggatggtagtgagatctacgggcgtacgatcaaagtcgccgctgcaaagccacagaaggatgccaacgaaggactaggcagcaagactgcgatttgggagcaggttcgttgggatcgatttcatatctaactgtaacctatactaaccgatgcattctgtaggagggttatttggccaagcatgccgtcagcgaggaggatcgggaagcggcggaggaggctcaggctgcaagcagtcgtccgcaagatcctatgcagggattggaacaattagatgttgctgggccaaagcccgagtgatgcacgctacactttacgatagctacgacgaagatgacaaacaaaaagcataagtcctaatttgccaattacaccatcaggattcaggctcggacagccggaatatgtacacgggctgcaatttcgagcccattccatttcttctccattggtctttctcaaatcatgcccatcggcttcaaattctcctagttcaacaatacaagcggcaataatccaaaaactgcgcgtcgcattctgagagctcaaagaaacatggtggtacatttagtagtcacggctctcggggctgttgcggtggagacgcagggtcttgtcggtcagcagcttcttggtgcaagagtagacagcagcgccaagggcgacactaagattgcaagttagcatcagggaaagacatgtggttggttgccagtaaagcgatatagcgtgataaaattccggcatgcgtcgggcatgttttcccggaatcaagcggaagatagtatcaaagagggagaaacatacgcgaggacgaagcctaacaaacagaccgttagcctaatttccgaccgcaaaatcatgactatagcacataccaatagggagcaactcggggggcacacgcttgagctggcgcagacgctgggagatagtgtgggctgtaggtgaattgttagttcaatggcagtccccataaaagtaagtccattttatatggctccgtcaatcaccatataggtctagtgatctcagagatacataccactctggggctccttctacagacataagttagtaaccgagggatcgtatgatcacaacaccattttcgagggaaagaacatacaggagtagggaaagcaaaggcccgagtgggctgcatccgcagcatgcgagtgggatacatagcgagatatgtgattcaacctggagtagcagacgaagagtgggatagaggacgaggttggaacgccagcttccgagaacgtgactggctcgggtgtaaaagcgagacgctcagtggctctcgcttgaccgcccgcggtcatatccggcacttcacagcttcaatcacccaacgtcgctcttcccggctcactttctcccctcctctgtttccactccactccaattctttttcacgtgtgtcgtttctctcgaagctacacatcgcaaatatgggtgctattccggaagccgaccccgatgaggtcctcgagacaaagcccttcaagttcgtcactggtaagtccactaccccctcccgagaaaaccggggcctggagccctacggagagtcaatggctaatttaattgtagctggtgcgtaaaccttgatattttccctcgtctttcgctcgtcgcatgcgcgtggaccgattttgcccgatcggctgatgtatggtgtaattgacaattttcgattggatcgcaggttacgatgctcgtttcccccagatgaaccagtacgtgataagcttttgttttggtacctttttttatttatctaacttggattcacttcacaggaccaagcactgctggcagaactatgtcgactactacaagtgtaccactgccaagggcgaggacttccgtccctgcaagcaggtaacttcgacaccgacaatattctcaaatctcagcagcttctaacggcttctctctcagttctaccactccttccgctctctttgccccaaggcctggaccgatcgttgggacggtcagcgcggtacgcatctagaagtctcctcttgatatatgcttattcatactaacttgtactaacagaggctggcaacttccctgtccaccttgacaagtagataaccaacagctgtttttggttggccaagtgagccgtgtcaaattttatgtatcgacaagttccaatgtactctactgggtcacgcggggacacaacccctatatttcctaagtcgttccatccgtataaggcagagagaaagttcataaactagtcgtattgtaaaatcatttgtgttgtagttagctgatgcttgttctgacctttgaagcgtgagcagtcgcaacatatctttcatgtagacgctcgcagtcattgctagctgggaagataacttagaattgagtacaatccacgcgtccttgcggaagtgcgttgaatgcgattcagtgtgtatgtatctaattctatgtaatcccagttccgacaagaaataatacatcatccagcacactgtacaaggccatggggccatgtaatagatatgccccaaggccgtctccggccgttagtcgaatctctgatgaaagaaaacccgaaagaatgcaagctatatacacgccaaattgaaaatggtgtgagtcagtctcaaggtgcaacacatagaaaaccagagagatgacaacaaatcgtatataccgaggatatatcggacagaggcgtagatgccgctgtaagattgggaagattcggcagggaaaaaagtacaaaaaggaatggtcactctttgtatctttaaatgcccttcagcttgcggtagagcttcttatgctcttcgaggaagaggaaagtggcaattgtatggggaccaagacggatgaagctaggcacccagccacggaaagtccatcctaggccttccttacggcagatatcacgcaggagaccaacgatagtatgaccaccgctatccgcatgagaagccgtcataatacgagtcttgatcacgtccacggggctgcaggcagtggtagcaacgaagcccgccatgaacgaggctgtgaagtgtgtgcctagattatcagccatgccggctttctccatacaaagacccttgaaggtgtcgtaagtagctagctgcgaggtagtcataaggatcgcgcgggttgagttaggccatactccgcggaagagagaaccaaatccctctgtccgggtcatctggatgagcccatggattgcgtttcggtagtttcgtcgctgggcgggagggagggacgcgtcgtgttgcatgcgcacattcatcacatcggccgggttgcctgctatgccaccgatgaatccggaagcagaggcaatgccgatgagagtaagcaggcctggtgcggcggctgggtctgaggtgggcgggctaatgcgtgacttcaattcttcgtagataccgaaacgcgtcgtggagtatgtgatctgacgcagcatcgcggctgacaactataccatatcccatccgtccttcgttagccaactgtgcccgtttactgtcatcgaccggattctagggtcgcacatacaccactatataaccccgtgacgccattgtgcttcagaatgtgcacaaacgtcccaaccatattctttggcccatcgggcgcacgagtctgtaaccggacctattgcgcaagaaacaaatatcagtgtcggggcttggaatcggggccacgggccattctctcggacaaccggctaggagctcctaaataccttaactaagggcgtagagttagcagatagtttataatcgagggagaaataagagcatacctaaatccaaggggtgcgttacggccgccgcgaaacaggaggccgaacctccaaaccaaaacgggtaatgcacctgcttcggctttgactgcgcgggctgaacgggcacgactcgggagtgaggaggaacctccaacatcttgccgctgtctgccatcttgctaggaaacaagacccctaaattatacacgcacaaaaaaaggcggggagagagtgattcaaggggatatgtgatttattttttttactggtcttttctcggcttttacgaacgtgacttgacgtaaatttttggccctttaaataccgacggagacaaatcagacctccgaaaccactcggccagtcgccgaacgtgaaaggcagccaatcagatcaagcgttttgataggggctcatcgcttgcaccaatcaccttctcgggtttgcgccgaacaatatcttgtatggaacatacagtccctcaggcaccctggatatcgtccttgttcggtcgttgaaatggatgccgagggtatcttaatccataccgccgtcgtgctaattgcttcaacagagctgttatgacgagatcggctatcatgcggatcttcggagtttttacggatgttgggcggttggcactggcgtcggactaccgagtggttctacaggacaactttccgatgcatgaaggctaactagacgggattatggttgtgatgtgatcagggtatagaaggtataaaatatctacttcagtttaatacgttgtttcgcagctgtctcggcgagggtattcgtatttagtcgttgtcgcacaggaaagaaaagccaagagctgggataggatgtattatcagttaaactacttgcttttgttcggagccaagtaaatacagtagaagaggtgtataacttataaagcaatgcaaactgcatagtacatactccgtagatacatagacaaccttcaatttagacgtgtgaaggttaaaatggctcggactaccagctgtagcaactgtaaataaatccaaatacgcttaaatcataagcctcttctcctagaaagaggtaaataaatgctgcgttgacataactcgttgtccagactcaacaaatacacttcgggaactaattttgccggcccgaacatgtgttgatagtgttgatagacaaccttggaattctcacaacgtccagctcaaccatgaggctatttgctaccggtcgagccctgcgtgcgagcagtggccgttggtcaattgcctcaatccgaccccaaaccgccattccccgctcgctcccactgactcccattctctcccgcaaccgcgaatggagctcaaccgccgctcgccggagtgaacaaaaagcaaccgctacctctaaaccaccccagcaacaatcgagcctcaaaatcgaaggggagacctacccaaccgaccagtggaccaacacccccgatacaatcctatcccatatcggacgacgactctatctcgacgagaaccaccctctcgccattacacgcaagctcatcgaaagccaattcgcagccccaagctatggcaactactcagagaagaaccccgtcgtctcaacaagacaaaacttcgacgtcctcggcttccccgcagatcacccgggccgcagtcgcacagatacctactacgtgaacgacaagacggtgttgcgcacgcacacaagcgcccaccaacaggcctacttccagcaaatcgcccgcaacgagcacacccgcccagaggaggtcggatacaccgtgatcgccgacgtctaccgtcgcgacgcgatcgaccgcagccactaccccgtcttccaccagatggaaggtgcgatgctgtggaagcggcccgcgacgaaccccctcgccgcctcggccgaaacagcagcgaggatcatggccgatgtggagaagatcccgcgccacgatgtcgtggttgaggacccgaacccgactatccacgcgcagcggaacccgttgcaggacgaacaccacagcgccgaggaggtcgaggctgtggctgcgcacctcaagcgctccctcgagcggatggtcattaaggtcttcacggaagcgagcaaggccgctgcggcgagtagcggtggtgcggagcaggagccgctcaaggtgcgctgggtcgaggcttacttcccgttcaccagcccgtcctgggaactggaggtgttctggcaaggggactggctggagatcctaggctgcggcattatcaagcaggatctgttgatcaattcagacgtgccggaccggattggatgggcgtttggactgggcattgagcgcattgctatgcttcttttcaatatccctgatattcggttgttctggtcacgggatgagcgattcttgtcgcagttccgcgctggccatatcgcacgcttcgagcctttctctaagcacccggcttgctacaaggatgttgctttctggttgcctcctgcggctgtgacgggtggtaacagtgctgctggtggagctgtacctttccatgagaatgatgttatggagattgttcgtgggattggtggggatcttgttgaggatgttactctcattgatgagtttacgcatcctaagacctcgcgcaagagcatgtgctaccgcattaactatcggagcttggagcggactctcacgaatgaggggagtaacgaaatgcatctgaaggtccgggagaagttagttggggagcttggagttgagctgaggtgagtttggagattgttgggctatactttgtactatactgtgattattatggagaacatgtaacatatagcattcctctcattgaaaaaatcgatatatggataccactcaagttctaataggtacagactatagctagctttgtctttgattagggtctaatttagggtaccgaaggtggaaggataatgaagacactagaggttatgacaatgcctctaagaagtgtgtattatacagtgaggaggagagaattatcaggggacgtagagctgcagacgtcacgaaacaagtgagaagacaccaccaacatgagacattccgtacgcctccagacacatgcaacaagggcgtatcatacagccgagtcaaagagacgagcagaagatagtaaggaatagtaattttcctgggtccaaaagccagccgtatccgagtataaaaccctatcgtgatcatgatgtatgacatatggtacaaagagaaggaaagaagagtgaaaaggcaggaaggtcgaaggattaagaatcgaagttattgccaacgatttaagcgttcttgacgacaccgaccttggcagcctgtaagagaaaagaaagcagttagtcaaaatattccgcaagaactttggatcttaggggctagcactcacccgcagaacgcggccgttaagacggaagcccttgctctgtacgtgcataacatcaccatcctcaagatcagcagccggagccatgaaggtagcctcgtgcaagtttgcgtcgaacttctgggccttgccgtcgaccttctcgccggggtcgaagcgctcgaggccgtgcttctggagggtgttcaggaggatttgctgggtcatgttgagaccggcgacgagatcgaggaggtccttgttctcttcgttcttagcagcgctgatcttctcttcgggcacagctagcagcgcgcggtcgaagttgtcgatgctatcaagaaggtctttggcgaaaccctggatggcgaacttgcgggcggcgtccatgtcgcgcttgttgcgctcaacaaggttgcgggattccgcgacggagcggagccatttgtcctaagaggaagttttggttaatattcatccgcgaaagagttgcggagctacccgtagcagtaagtatggggaaatagcttaccttgaattcaatggcttcctttgtcttctgttcgagctccttcttgatgggatcctcggcctctgcgttctctgcactctcagacttctcggctttctctttcgcagcttcggtagcttccttggtctctgttgaatagagacgggtagaccgggggacgaatggccggatagccgggatacgcggttgttgtgtagtccgtcgcagcgccagcgatgcggtggagggggaagaggtagagaggatggagcgcgcggcctgagcctgtctgaggagggttcgttggaacattataaatgatgatgtgtggaattgagaatagagactcggtgaatttgaagcggaaccatttgtcctcggacaaatttgatcgggaatcacctgaccttggcaaggaaaaacgctgggccgaggggatcttcttttgacttctctacggagtagagctattacgtatccctaagcttgggaagtaccttatgtattgacttgcaaatatcgcccagtgggctatttgcacctaccccgagcatacgaaggatgtatactttattgatcgcctgggcatgatagtccgttctacttttgaagcatgatcattgtgacatgtcgctcattgggttatttcgaaaacgtattaagctatgaaagacattcctggaaaagttcgaaatgattctcaacagctcttctgggatcagacgttcggttcattttccgcatgggacttaagaattcgcgtgatggcacggccttcctctcgatgctctctcacgctatagtccaacccgtaggcgagtacaattccccattcagacatgaatctcttcgtcaaccaacggttttcggcccatgtaagtggctctacgccggaggctcgcatcagaccggaggccatcaaggcttcaaatctctgccgctcatgctgggaccagaaggcgtgaatcatgtagcgcccgttagagcacaagggcgaaatcccgaactcatggccgagtggaggcgcgccaagttggacttggtacagcatggggccttcacccataggcttaaagtaggccgcaatgcgaccattggtgttctttaatataaaaccggagctatctggggcactggagtcgcatatgatagtgtagtcgtcttcgatgggccttccgatgatgttgcagagcattgctggggtatggagaacgttcttcaagcagatggagctatgcgaatccagatcggtctgggttggcaagctcgtggtggtgagattgacagttcccatcccaatgacttcgaccatgcctccagctatatccgtgacataagacctgaaggggatgtagtctgtaccgaaccaacagcgatctttggcagtactggcctagttagatggatggatttggccctgcgaggcagaaaatactcactgcgtgtctgagttgttggaatagacccaggagggacatggaggaggcggtctgtcaggcctcacaggcatcgatgccatggcgaagcaattattcgaagacaagcccgaggaattggaaatgacgttgagaagttcagttgcgattctagcaaatccagatacagagagatccgtattctgtcttcgccagatgaagtggaatagggaaggagcgagatgagagggaaccagataggaaggaaagaaggaacgaggaagcagcccgaatgggtctgtttgtttgtcgtgcacaatcgcttgcccgggaagtcactgtatcctcagacctcaactatcttctccatggctgcattacaagtggacaatattcactgccgttagggaccaaggatttctcccttatagacagactcggcattctacactgtctcccagacgtgaacatgaacaatggccaatcccatgaagtgatcataatatgcgtaagctatcacttatcatatgaatgaacaagcctgatgatgctagttccgtcggccagaatatgtttctcttcctcgagtttatagcctctccatcgtgggagtaacactgtccagatataccagtagagaaccccagagagcatactgtgtttgttagcgaggtaaatcacacatagaagtattgccactcacattccaatcccgacaagtggataggttgcatagaagagatcgaggtcgcgccaattcggcggagggacgaatggtgctactagcaggactaaacacaccacaacccgtaaccagacagccggcaaccacgctttgaagggccgtggaagatcaggctcccggtatcttactataagcagaccgactgtaatagccaaggcaaacatctgtccaggatatccctccaaatccaggataaagttatagacgtccccttgtggtggcagggcaagaaccagcatagaagggatatagtgtacaataagtccccccagtggagtcccaaatggccgcgaagacgatagaatgttttgccatggaagaaagccttgtcgggctatctcttgattcacacgcgcctatcaatgttagcatgtattggctttctatgcaatatatccaaacgtaccaagccaaaggtcaccaccatcacattcccggcagctgaaatggcaatagcaagtggaaagaatatttttccaacctgatccccaaataatctctggaatagcagtgcacccactaattctccgctattcttgatctcttcgagcggaatgacgaggaagtatgaaagattcgcaagaaagtataggcccccagccgtgaccagtgcagtgggacacacggtcttcactatattcaccgggtcatgaacttcactgaggacattattcacgttgctcaagccagcataggaatagtagactttgaacaaagccgacgagagcagactccagctccagttcgatccttcccacaacgaatcccaagaaaacggaccaactctctctacaggcgataagttatcagtatctccatgcaaaccgagaaaaaccacccagactcccgtcaaggacatcgcgccgatgaggaagatcttcacccagccaagcacattctggacaaagatgccagttttcaagaaacaaccatggacaatagtaatggcagtcaagaggccaacagcgagtgccttgtgctggatttcggtaggctcaatactcagcgcgaagaacgcgtatttcgagaagataatgcagttgctcgccgtgaaccccaggagcactacctgagctgttataaggcttgacgcgagaaagcgcggtcggggataggtatactcgaggtacacctgcacggaaatgagattagtttagccgacttgtttctgctaatcctgctgcaatgtcttttaccttttgtcctcccgagcgaggtagcatgcatccgaattccataaagacggctaggccgcaagctgataatatcgtcccaaccagccatactagcaaggtcaatccaatacttccagcggatctgacgattgagcctggtgttgcgaagatcccgctcccaatcacttgcgaaacgactagtatgtatgcgcttgaccagttgatgctctttctgtagtgcgtccctggtagagtatcgggatatagtgaggggaaatcatcggttaaaaggtcgagtggttcttgttgagagctgtcagatataatgttggattgacttgatgagtttaaaagaggctgtctctcctggatatccatggtgagctgttgcagatggagtacgttgtatagtttgaacaactatttgattatgctgattacacggaggaaatcattctagaccatgaattaattcagcccagaggagagtcgaggagataagatgttttgggtgcttggaaatcatcggattagctggcacgtcattcaggccgactgttgtgtgtatcggattcttgcaggtggtttacgccataggaatgtgatcgcacaactcacattaataattaagaggaggtatgtaactggcctatcatactttggctttgaaatcaatgttaaactatgaccgaatactccagtactttattcgaggtggagataatgacccgtactgggataggactatatatagcagggttattcagagataaccacaaaagatcaaagaggaatattcagcccagtataaagtgtagtcatttaaattccaaacccgaatatatccctactcatagagtccaattatccaaccatcagagtacatatcggctgtttctgaattagtatcagcagaccaacaaacgtgtagatgagaactcacaatgtcaaattctccctgtcagtcaaatccaactgactattatccactacgcgagcgactttacccccatccgaatcaaccgtctcgacaaccccattgctagcgacctgattaaactccgcgagcttgtcgcgacgtttgttctctcggcttaggtagatccggagcgcgataataattatcgaaggaagaatcgcagcaacctggagagctatcagtcaaatattccgcacatagctttgtccaaacacgacttaccacaagcaaaataatccaagttggtctgtaccgaggcttgaatggttgttagtatgacagtccaagccagctcgaatgaagaactcaccttccattccggccggaataattgcggagagatgatatttcccagtccgtatccaatatgataaagcgcaatgacggtagttttcttcgtatgacccgcggacgcattggcggcccagatcatcacaacagcatatgggataccggttgtagatctaatccagattccgacgatgagaccccatcgattggaccagggcaaggctgtcggaccaattagtagtggaccacattttgaaaagaagagacctactaacctagcagaaggatacttgaaagagcacctggaatgtatgcaatgagtgatatccatgctcggcagttctgcaagtttcagtccacgttcgcattagatgaccgagtctggcttaccttggtgtgatacaaagtgattgcagctgatatgagagaaaagaacgacaccacacccgtgacggttcctaatagtgttgtttgaagaacggtgaaaccaaatgatttgatgatcagggaatattgattcgtgactccgtttgccatttcctgggaccaggcgtgtaggaagaagagccaggttttggggtcttgaattgcttcaataaacctagagctttagttagatattgaatatcaagatttcttaggtatggggtctgactggtatcttttgaaaaccttttgctcgattccggagtggttctctttgatccgtaaaatagccttcgcacgttcctcgtgtgttaggaaattagcatggataggactgtcgggaaagaagaaatagacaaagacaccgaaaatgaccgtaagaataccagtgatcactagaatagaggttagcaatctgacggatatactcggggaacaaccatacccatgaaccatttccacggagaaaagctgcccgtatcaatccaaagaacaccataagatagcaatcctgacgtgataggacttgcattaccaattgaccacataaccggcatcatgacggcctgctcgccataagtaaagtacatggacatggaaagcaggaatgctggaacgatgcatgcttctgctaccccaaggaagaagcgaacaacaaaaagagatgcaaagctgttgcaaggaatatgcaagagagtgattccacccctatagagccagtcagtgaccgatataccattgtttgaggacaagagaagaacttaccatattatcaaattgccagccagccacttcccaacaggaaaccgctgcaaggcccaattctgcggccattcagccagaagatacccgaaatagaaaattgaagagagccagttgtattgattcgagtttagatgcgcatcttgcatgatccctaggatcgcagaacttccaagctgctagcatgttattactggattctcctattcggggatcaaattaacataccgtttgcttatcgacatacatcaagtgatatccaatgcagagaaagggtaaaacccgccataagcatttgttgcgaatctgtattgcttcttcgggagtcggatctgtgacctgaattttcgagaacagcttaaaactctcatcggcaaattgatcagggagctttggggtgttattgaaatcattgtcactttcttcattggcttgtgtttctgccacgaagccaggtttatggtcttctactgccatcgtgtgaggtataaacaacgaagaatatgaacccgcgtaaaaggctcaattaaatgcataatggcagccctgctcatgtacttatgatagtaattagcctatagataaaattgcgcaatgttcctaagctccgtcgtcttcacactaatgagagattcgcaccagataagaggaaggagactgcgggctcaccacagtcttctcctaatctggaaggtcgtgcactatatcttacttggcagaagagtgcttgattaatcaaaacgcgatgttcatctatacaaacgcgagtttgactccaaagcacgtctaaagtcgccattgcggggttgcgtcagcgctgcattgttggcgtgcttaaaagctccgaagtcatggccgcgatagaccggaactataaaatttttttaccagaagtaactttttatcgaactgatccctgccgaatcgacgaatatccaattatatcaatatgacagaaaaaaaggaacctattcgcgtcttgattgccggcgcaggcatcgcaggtctggccacggctatatcgctaacacgcgtatcaaccgttccgaacttggatatccagctatatgaacaggctccagagctcctggaaataggagctagcatcgcactcagtccaaatgtaggtatctcgcgcattctcttgaaatgattaaagcacctaaccgtgatgaaatatcagggcatgcgcacactggagaaactcggcgtacacaatgccctaacagacgaagttgggtttagaggcccaagtggaatcccacaaatattccggtgtggatctatcacatagactcgagttgtactactcagcatgctgattgataaatagccactggaaaacgaaccaagtcgtgtctacagacacccacactaacgtccccgatccccgtcaccataccacccgcttccaccgcggccatgtgcactctgctctgctcgagcatgtccccaaagagtcaatccacttgggcaagaaaattgcgtgcgcagaagccaatcaggatggtgtttcgttgtatttcgaggacgggagtagtgcccacggagatatcctcatcggggcagatgggattcgatcggtttgtgatatagcttggttagcattgtgctttgctaactcctgttcagagtgtcagacaatcgttcatcccggattataagctacggttcagtgggaaggtattcatgagggcgacatttgatgcctcgttggtagagggcaagatccctgatttgcctgctgattcgatgcattgggtatgttatcgctacattagggagctttaaaatcgtcgctaacaaactgtcagtggggtcctaaagacaacttctttgcgtctcgtcttggtaagtgaaaaagaaccagcatttcacggctgcatagatctgacaaaaccaggcaaggaccagtacaccaccgttggtgcatacgatgacccgcgttcagtagacgaggtggagaaaagcattgcgtgggatcaacttggcaatgtggagttcctaagagagcgatacaaggtatgttctcaattgacctatctgagcttcagctgactcacaccctttaggaatggaatccgacggtcaaagctctgaccgagcttacaccatccacaaatctctatcccaatttcgcgggagatgctctcccaacttgggtctttgggtcacgagtgactctagtcggagacgcagcccatgcccatggcggttccttcgcagccggaggctcgctggcgttagatgactccctcgcccttggccttgcattcaaggaagtgttcgcttcaagaaaggccacgttctcggctggaaatatcaagaaggcattggggctgtacactcaaaccaggcagccgcatacagctcggttgctgggcattgtgcacagccagatcgacaagaaaggtactatttttgcgacacccgaagaagaggatgctgcgcttgttgctcggatgactagcaggccaaatacggagtggctatcggaacacgatgttgaagctgcgttcaacgctgtcgttgaacaggaacgggcgcagcgacaggtacgccttgctgcaccagaaaggaagacaggtggagagatccagctccagggaagcaagttatagaatagagtcgttgattgattcctgatttatttagcacatagaggattgtgtttatgctatgtggttactttttcttgacattttaactggtgagacacccgaaagacatctgttcatcggaatctatgtacctatccgattagcttttgcgacattcggccgaaaagcaagactagggtctggtgtgctatacaacggatagttaggacagatgatctgaattcccgagcaaggcttgtgggccaggatgtgccacgaatatctgttccactatgctttcaccatgtctcgggaatcgatagggtatacgctccataaataatcaattgaggagcctgatgactgaagcaaacgtgtctagtcccagcctcccaggcttactattgtaaaacattgggttggttatccaaggcttgggagaaaaacacaagtggcaatgcgatagtggatggccctagaggcgtaggcagaatgataaaagtgcaagccaatggggcttaggcaaggctagtgataaggaataaccttgtataggagtatacgatgtgaacatcgtacttttccttgttcggttaagtcggatgttccgtcaaaaggggcggagcttctgttgaggtcacggggtgtggctggtgcaggtcaaaggatcaactgaattctgcgtggcgtgtgtggcgcacgcatgagattatggctcggaaggacggaaggctatagtttattctagtagaatccagtcgaatgaagcaaaatatagtagatcgtcacagctctttgatctgaaggagggctggaaccgggaacaggtggatcgccaggaacataaagacgtggtatgtatgccagaggcagtgcaaggacagctgcgcctcacgaaaaaacataccatcttgtattaaatagagacagatccagagtcctttgtctttccagttcaaacaattctgaataatctcgccatccgacagtccattggacattctagaacgtttctctaaaccagttcttatccggtggcaacctcctttatcttctccttatccaacatcctccaacatacccaaaacatacaacctacacacaaaatggctacttcagtttcaatgactaccccatcccactcctcgcggccatccctatccctagatattgccaacatgcccccactctcccagccaacaccaccctccaacaccctcctaatcaccggtctgcacgatctacttgtcttccaacccccagcactggaggaaatccgcaaacaaatcaccgaagtggcacctctgaattccttctccccactcccgtccatgcgccgcatcgtgtgctccttccacaacgaaatcgacgccacggcagtgcgtaaactcctggacggcaagcgcctcctagaccgcaatgtgtacccgcggatctacttcggcgagccgacagcactcctagacggcggccgaccgaaactcctcgaagccccgcaagtctccaagatgttcttcatctcgccaccgcccagcccgccgcacggatgggtcgtgcgcaccgagggcccgcccaacaaggaagtccacgcgacggatctggcacacgcgctggcgatgctgaagacagaccatgaccatgcgcagcccgagccggctgcagtcgaccccgcaacgccggtctctatctcctcggacaagcgcacgtccagctggccgcttgctggccatcagcgtagcaggagcagcaccatcatctaccaccccgaggaccatggtgacagtccccatcttccggcggttatggttgaggatatgacgctgggtactgaggatgaggatgtggatatggatgcgatgagccccattgagatgtcggttaaccagatgccgcctaagacttctcgtccgccgcttgagttgatggagtagtgttttccggggatgctgttcttttgtgttctacattctgcatttttagcgaggcatggttgtttattgtgtatagtcgcatctgtggcatgccaggcgttgggaaaggatgggcatttcagcagcttttccgggatttgcttgacgttattctttattgctttacgaggaccattcttaataagattcttaaataaacattgcatattcatatcttatctttggtagttgtatctgataatctatactaatgttattgttggctcagtttcttggtttgatagtgagctccgacatcgtcaatttgcagtcaaagagtgaccacacactgctccatagatctctgcctagtcctatacaggtgtagaagctaggacaataaagccttgagggcttgttccgaccttgagccggtttgaagtcctgtatctaccaagaaacaagagcatgtagattttcgtgattggttagtagtctagggcattgactgaggtttattgttgattcccgcatgatgccataacttataggaagatatttcatagtttagcaagttccatgatattcagtattttcaggttcactgaaccatcgagtagatatttgagatacagagaccagtcattctctatcatcagaagactgtccccacagcaaaagatacaaagaatggaaaactccagagtgcgcccccattcaccaggaaatcaaaactccattgcgcatgctcaggctttatttttatttgctgggttatgcacgttcagaacccatagctgctctgtccgtaaggcgtagcaccatacggtgtctgtgcactagcgccccaagcactagccgcaccgtttccgtaggcagtcatgtttccgtcaatgccctcaggtggctcgtaagcatcggggtcattggcacccatcatctcagcatcgtcagcacctccgccatgtccatcctcaccttcacccaagagcacggagacggtggttgcgagcttgcgctggagcgccacaataccctgctggataatcatatctggctcaaggttgccaatgctctccacgtcgaagtagaagcaattaggctcagcatcgtagtcgaagggctggtcggggttggcagcgggttcccaggcagcgttttcagagataggcctatcaagagtcggtatgttagcagatagatcgaagaaaactcgtgaataccagctcaacgcctagatacgtaccattccttcaccggatcctgctcataccagtagtccacatggcgcaggttgttgttggggtcatattcaaagccgacagcagcagtgggcgcccacttcgcatgctccttagctgttcccttctttgctagacaagtcatcttaatctcctgccctttgcgcagcttgcagatcaaggaacccttgttctcggggtcagtggttacaggatcgccgatcttgtcgttgatccgctcgccgacgacaaccagatcccgcgcgtagacagacatgatgccgctgctgcagcgcgcatgcagagatagtgtcacgctgcagcgcacacagtggtcttcgcagtcgcagtctcgcgtgtagtcgagatcttggtcgcagttgtacgagttcaaggggatcatgccgaggcggtgggcgaggaactcatcagggaggaccgaggtattgctttcgatttcgatgatgtcgagtgccaaagtgggcacttcggcgaggataactcgtcggagggagttggcgaatgagaggtcgactgcggtcagtctgaaatcgacgcggtaaggttccgcctgtggaatttgtgagtcttatgtcctgctgctctgtggatgtctcagcttacctcgcggactgttacttggggccctgtgggctcgagatccatttcgtaatccatgttggtatgtatgcggcagcgctgctcgctgccacccttgtctggagctgaagatgtttatctgcggggcgtaaaagaaagacggtaggttgaagagtgcggagtgcagtggcgaatgacagggtaatgagaattgttgtggtagatgaattgggcgcgaagttggcttgagggcacgcgggtttgctccctcggagacagctttttgcgctttgcctaatcgggtcacagcctctgaaagtgccaatatcgagtcattcttttttacatttacagccataataaaatgctttcacttattttctatttattctacggttctcttcttcgtattcagattagagagtggaggaagtatttcagattcgattcagttgctgggtataaacactgaatccatccaaaagactggtatctagaactaaaagaagtgtgcgctcgattcaaatctggcaattgaagccgtgcaattgattcaggataaagtaatccgatatcacagttgataagctaaggtatcctccagtatcaatgcaagaacgtcccaaagccttcaagtctgcttgcgaaagacgtctatcagaaggagacaaagcaaagcaacacaggctcagatgttcattcgcaaatgaaacagcagacgggtagcggcagcccgtcgaagatgcaaaaaaaggtaaaggtagacaaagccaatagtagaagcgacgaagccaccgttttttggagttcatgtcgagtcattatcagggagcagctctctcgggatagcagtgcacatagaggtagaaaaaaagagggagggggggtgtttgatctgcaagagaaccgaatgtgcacgcgatcgaggctaccgctttaaagagctgcgatgcaaggcttcaagcaactcgggccgatttgcaagggcagtggcagcctgtgtatacgaaacccactgccgtttccgcttgtgcatctcgggccattcggtttcctcctgctggacggtgacttcgaagaactgatatgaggctttgggcgcgtgcgccgtgagaaggccggagggtctcatgtccggaatgagtcccagatctctggtcacgacacagatgacacccgcttcctcccaggcctcacggcatgcagcctgctcggcagttttctcatcgagctcccaaccgcccttggggagcacccagcctccgggtcctgcggattgaatcatgaggactttggtcttgtcggcggaaatagggacaacgccggctaccagtcgctcgccttttgagccgtagcctatgccaagccgttagagtcaggaaacacggggacagtgtagacgtaaggggtacgggtgcccccccacgtgcgcagccgcaaagcgacaccagcgataactcacgttggtttttccgcccaacgcgggcttccatagaccgtatttgagccattgtaatagacaatcgaatatctttggaattactccaggatttggtgaggggtggaaagtcggggaaaggaagaaagggagaaaaagagtggaaaggccaaggatatcgaaaagatcaaggaaaacccgatggatgatgctctcggaagctccctcggagcctgtcaggtctctgaggtgagggaggaagctccaggtgtctagggtggtgtcaagggacgggagtacagcgcgagggcggtcgggggaaatttttttttttctctttctggatattgcggaggtaggcaatggagatcaggtcttcccgttcatgcctgacgggggattggaatggtaagtggaaataggcatggttttcaaaagaagaactgagaaatgggaggttattgaggaatggagaaacgaagagaagtgggaatggaggggcacggcggcgcccgggagaagagtcgaggtacgtttcgattttttcctttgttttttgtgtcttttttttatttttttgtgctcttgtttgactatctcaacttgtctttgttatattgtgcactatagtgactctagccacaacagagagcgcgtaacctgttcaatggccttgactttactctgtttcactctatatatggtcatgtgacactccagatggaagaagtaactgggatgtttctatatttgctagaatctgctgtattttgctatatttgccacaatccgctctgacctactgtaatgtacgcttactattccaatcatccaatctcataaccctgtgtgcgtcgggtaatgagcctcttacaacgggatttggtaccgagatgggagaatttcgggagtttcgaccagaaactataagatcggccgtgtggctggagcgatgagatgcatagacagacctaactaggtcgacccaactagacctaaaaaaactacataagcacgcataaacgtagtcaggtcccccttgccgtatagtccgcatttacaacattaacccccgccggcttctccgacttcatctcttccgatactacaactcacgtccactcgccagtgcacgccaacggacatccaatctaaacatgcaacgggttgacgccgaacgcgcgcgagaactgtcgctattccgccccctaggtacgtcccactctcctgcagggaaccactgagataggcctctgttaccccgtggtagttccactggcccagagcgctaccgctgaggggaatttggcggggatggcaacgccaatgcatgcagctctttgatcgtccatttcgatgcagaaactaatgtgatgtgctctcaggttaccaaaagaactcgtgtggctactgcaagtccaaagatggaagttggttgcccctgactgctttgttggcccatttttcttctttcaggtctagaatggctatgctgactagtaaaaggtgcatcgtactacgccagttccacgtccgtactcccggaacattatcaagagctaatcaatggtggctggcgacggtatgaaccccggttcaatttccctgtagcccatcagaccatactgacatatttagatcgggaaacctctactataaacaaaacctgcttcggtcttgttgtcctcactacaccctgagattagaggcatctgcttatcagccccgccgggatcagcgcaaggccattaacaaatggaacaaattcattctaggtcccgagtatatgcgaaaggcatcccggctttgtccgcaaacccgcgagtaagcaatcctatattaccaatcttgctatcagatgactgctaaccaacgcatagagagaaaaagcaccgcaagtgccactttgaccttctgcccgctgtccaccagagcgagtacgaccacgtcaaacggccaattgaccctgctaccaagcttcccattgaaccagcgcaccgctttgaagtcaccattgaaggtgactctgtgtctcaggcgaagtttgagctgttcctcaagtatcaaacggccatccataaagaggatgtctctcactggaaacccaaggactttcaacgcttcttatgcacaggtatcaagcgaactccgaatcccctaaccgccgccaatgcttccgagaagaaactcggttcatggcatcaatgctatcgtcttgatggcgagctcattgctgtcgcagtattggacttggtccccagcggcgttagctccgtctatgtcttgtaagataatggctgactacacccgaagacacctaaatgtgataagctgatgttcggttccacacagctacgatcccgcctatgagcaatgggaaatcggcaagctgagcgctatgcgtgaaattgccttctcgatcgagaatcagtatatgtactactacatgggtaggtcgcagtcgtggaactggtccttattcgtgcatctctgacaatcgacatatagggtactacattcataactgccagaagatgcgttacaaggccaatttccgcccccagtacatccttggtaggttcgactcgtgtctagtcttggtacatacttttgtactacgtgaaaatcatgcacaacattaacccttttctatttctcagaccctgaatcctccgactgggacccgcttgatggcgaattgatggagaagcttaattcccgttcctatgtctctttgtctcgagaccgaacatcctcgcctgcgcctctggtcccggaaagtgatgccgatctagaggaggtttccctcttcgatctcggtatgcctggtgttcttactatcccccaagtggaagcactggacctggatcattggctgctgttctttgacaacaattttgttcacatgaaggtatgcatgtattctatgattttcggtcctagggatgtctttactaaatcaaaataggatctggtcaaatgggaaacgatgtcaattacttcgccaatgtccatcaagggaatcgtggccgagttggccgcagtcctgggcccgaaggttgtccgaaacagcgcagtagacttgctcggttgatcaaagacggcgatttgagcctaggtttactatcaccgagaccgactggggttccaaacacccgcaacgaatatggaacagatatagagtaattgtgtcgaataattgattcacatgcaattcagtcaaatccgccaaatcgaggcagtctctgattatcttaattctagatccaaatgacaattcttagcaagcaacctggtaagtctataaagttccttgaatcaatgaaatgctagaagctcgacttctactagtcctgaaggatatgtgacgtgtacgccccaaattcaatgtcatagatcgcgctttccttccacgcgtatctacgtgcctacctaactaggaaaccatgcccacgtgattcattgtttaactctctcaactctcctcactcttctgacttttctcaccatcctaatactcataccctttcacgcgggcctttggcacctagtcatctcgaatccctcgatcgttcttccttatctacgctggcccttaaaggggaggtgctcagccaggtttgatttcacggagcatacgatccgcatgaaagagatgagatttgggttcctagtaagaggcaccttcctggcattgaaactctctactaactctttaagtaccgatttctaattggataggatcaagacatgtccatctatcgaacagccgttgaaaccccttattaaggttgtcgcggtacgaatcgaagggagttgcatttggggaatactttcaggactcaagttggccctccctccaccaagccctcgcgtttctatgggggtttcttcttttatatgtgggccttctggtggaatggaggattggttatctgggccagcgattgatcgaccggtatttacattgaattctgtgaagtcggatatttatagaaatagtcatgttattcattattatctcggaggcaattttggtggtggatcacatcaacgaaaccacgtctttctttttccaactagaccgaataccctctggtctccttgatgcttgccgtttaaaaaaataattatgtagctgagtcgtgcccaggtggtatcaactttgtttgctgtcttagtaccatctaagactccctccctttgtctacttcccaacacgttcacgcacctgcacggtttctatcctaagtctatcatatttgatacatacagagggggtcaattgctatgtcacgcggaacggaatagaatggaatgctatgctaaactatatttatggccagaatattgtctttctcttcgttggatgctcatcctctatttatatcaataaggagacaggaattgacctattgctcctactccttggggtataagagtaagtaaggacactcgtttatcatcagcggttactaatatagtacaggatatttcaactcggcgtgagagagtgtatgtggcacctaccgaggttttcgcataccatggggcatgcactcactatgcctttcgagaagacataaatttggccgagcaatatcagcctgacaaaacgatgaagcaaatacagataatccacggtatacaattcataagtggaaggaagcattatcccgatggctcctttgcctccatctctcaacaggacgcccaccaggatggactgggcaaattccatgctcttgtgattctagaattccgatcatgttgttcatgaatcgttgtggcagatgaggccggaaatcatcatacctccgaaaattgtgacgtccactgtgacccgagcgagagaatttcagtgtttttgatatatacaacaaccttgccctcatcagacagggcttccatataggttatcgagctcaaagtgccttgggtggatggacatagaatcgcaagctttatgcaagtccaatcttctaaccatggatctcacttgcgaatgttgttggccaaatctctggaatttataatggattttcaatgcatgtacggtttcctatccatctacaagcaaaccatatccctgagacaacgttatattgctcgccagatccaatcgagcctagcctcatggctcaaggtgatataagatcacctcgaatgtctgattggatgttctcttcaaatgttctttttctgtatattcctttcttctcgatgttatagctagaaaggtgatccttagctatggaaggcagaaatgcgaggctcatcaatcactctacaacaatctaaggcaacagagaacataaaccttgtagaagacatttctatgtataaccaaaaacttatataaagttacacaaggacgatgactatgaacagtaagaaagttcattcatacacccaaaaaagaatcccataactagacagcgccatgtagtaaaatcaagccagctggcgccacatgtttctatccgtttgcctcgcaatcctgcatattcgccacgaagtccaaagaacaaaagaaaaaaataagcagtcattcaaaaaggcacagcaggtaagccaccatattcccacgaaaagcccgcagccgcggatgccccctgccagatatgccctagaacgccagagcggagagacaaaagaacccaaccaagaacaggatgctatgccaaaaggatacatgaggccaaaagaaagaaaagacaataaacaagatcaggaccctcaacccttcactcatcatcatccctcccctctaatccatcaatcatagcccgacttggcttcctcccagccccatagaccagctccataagcttcgccttctgcctttcccggacagtccgtaggtagtcatatgtcccctccaacccacggatctgcccatcaataacagcctcaacaggcccaagcatgcggcccggagaaccagaatgcccattcccgttccccccatcaacggacccaacaaagctaacagagtcattccgacggacgagcgggctaaccagcttcctgcgcagcgtctctagattgaccttcagcgtgagcagtcggccgcggtggtcaacgaggaggtgtttattggcgacagtgcggctgcggacattcgcgagcaatttcttgttcttctcgtatttgcggaccgccgcggcatcgggccctagcacgcgagtccacagggaagaaagcatctcgccctccgcgcgttcctgggcgtcggattcacggacgactgtgcgctgcaggttgaggaactggcggtcgatggactcgaaaagcgcgaagagcgcggttgagtgggtgagctcgctgtttattgattcttctagcacagcgaggaactccgtgaaggtgcgggttagggttgtgcgtgtccgctgcgcggaggttggcccaaagacggccattacgaggtggccgaggggcgtcgttgttgttgaggttgcggggacgccgttatcggagatttgagctgaccgttctagtgcgccgaggcgcgaaagcatgttgtgcatgttgtcgaagacgattgtggggagggtgcttggaggctgggcggagagggtttcgagctcgcgcttggcccagtccattactatgaggatggagtcgatgtccgagtcaacgtttgcgaagaagcgggttagctcgagagagagggacttgagggagtcggagagctcgtccagttggcgcacgattataggtgcgctggtcatgtttgtgccacggacagactcgctcaagtcccagactgcgacaccggtttcttgtagtgtgccgatttgctgaacgccgttctctgagtagtatatcagtggttcgaaggagcgtgcgaagccggatagctttactaaatcggggatcgattgcgggaggcctggcaggaccagggcgcgcatgaacgcgactgagatgagaaggattaagatagataaggtggtgttagacttggagctggtcatgcgctcgaactttgagcgtaggtagccatacatcgcggcaatgggttctcggtgctggacttctgcacgcactgcaaagcgaatgtctttattcattcacaacaatcgttagtatacccgcgcctgcaactgaaaccagatcagacagggcctacagttgctcagattctccgcgccaaagcccaccccatcgtcctcgggactgcgccgggatgcgcgccctgtattcggggccggaggcggacttggggatcttccttggagggggctatctgcgcccgccggtagaggcacattagccgcgacagagacgtcgcctggggtggcgcgatcgcccggtctactcttcgcggggccctcgagcgcatcctcatactgtggacttggctcgcgcgactgggaaggggaaacactaagtccgactgtgggcttgagctgcaagcactccgcaatgaggttatctttgcgcagatagggctggtggcgataccatccactgccttggacatattcgggtggatggaagccagggggtgaccatcgttcctgcgtggggtcctcgatctctccatcgtctccgtctgagtcttcagaccggaatccggagtgttgggatggcagggcgaacattggggacctttggggattggtattgttttcaaagtcttcgagcgacgcgtccagggatggatggtcgtcgaagacgttgtctaactcgtctagcatcccggacggcgtatcgcgatagtcgcgcctcagaagaaaaggcactgcagttctcagcgacgaagcgcagatcaatgcctatgagtggcgatcagttgcggttgaagcacttggacttccttaggtaaacctgagtggttagtatatgcgctgggacagtgtctcctgcgctagccgttacagaagatatctgagcgatgaaccccactgcaaagacgcgataaggtatgatgcgatgcgatgcgacaaggcaggtaatgaattctagatagcgacaccggatatctccgcgataggcacattcgatagttggtgttggactaagatgcgatcaggtaacgcgctggagattaatatggaactgggatcgaaacgcctccttgagcaatgcaggaatcaggaatgagaagacgagaaagcatgcgtcccctcacttgtatccaggtcgaagaggctgggccaatcagcctaccccctgctggtcatgtgctgagactcgacggtttatacacatcagataccgggagaggcacaggggtggtacgagtccagtacttcgagtttatgttgtctaaacagtgagcaccaaggtactcgtcaagtactcttcaagtatatccgtgcctgaccgcccatgtttgcccaatcgatacgaccagggcccccagccaatcagaagtcaggcctccatgatcatccgaagaatctcaaacactagggatagacttgcataaccccgtttgcagtatggagtacgtttgttctattaacagaatatcaaaacgaagtggagcagagaagcagaggagcagaggagaagagaagatcaaatctattttgactcatggaaattgtaataaaaatacaagcccggtcccttgggaggcccgggaatcagcccatggcgccataatcccagacttctatggggagaaacagaaaaaaagccggggaataaaaaagaacatcaggtcgtttatgcggtgttatccttgagccagctatggggttgtcagtggggttcaggggagtgtggatattcgcgggtgacgtacgtgatgagatcgttgcgctccttggtcttcttgagaccaccgaaggccatcttggtaccggggatgaacttcttggggttctcgaggtaggagaactaagaggtattgttagtcgccgatcggagcggaattgaacgtggcagttggcacttaccagagagttctcgttccactcaacaccggcctgcttgttggcgtcggtgtaggcgtaaccctcggcttgaccactgtgacggccgaaaagaccgtggaggttggggccgaccttgtgggcaccgccggcctcggtggtgtggcactgggcgcaacgggtctgaaaaaaaaatatccgttaggtttcctcttcacttgtctgcgcgtgaagcaataatgaacatacctggaagagcttggcacccttggcggcgtcacctggagcgaagttgagattagcgattttgtcggcttccttcttggcttcttcgacgagagtggccttggcacgctctgcctcgcgcatgtcgatgatcgtcaaggtgcagaacacatcgaaggtagtcatgttgaatatttccaagcgtggtatttgcgaaaggtggtagcgatcgcaattgaggtaattaggttgacgagggagttgcaatgtgaggaaaggtgaggaagtgttgttcaagcaccatctcaggttaacaaagcgcgttgccaattgagatacccttcacttccttccctgaacctccatggcgcctccccgacctcctttcagctcaatggggcaaagtagatagcttaccaggggcgaaagattcttgcttcttaggagccattgtgaagtattatgaaagaataaaaagagaagttattatgacactgtactgtacagaaaaaactaagaaggggagagaagaaaatctggttatttgtacttgggccccgacgcttcctctcgtaatccgccattccgccaatcagaggggagatgattcaggcggacgggcgcaaccggaaacttcggtgtggctgttgtggctctgacatctttcactcccttgtttgtgctttctcactgagacttggaggttcaatgcttgggacagctggcggtttgtctgtggcaacaaaccgacttgtatcctctatcttctatgtcccgcccctatgatctcatacttcatcatcagttagctccgatacgcttgtgtatatgcaaagcttcagttggctcggaaacagcagctctttcaccaatttttcactctacagagcacccagacgcccatggcaatggtggcccacatctacgcatattcacccttcactccttctgctggagaactggagcaacttgcccgatccaccgcagcttcgaaatggcatgattctcattcgcccgagagctggccggtggtccggcgtgtggatcctgaggcagaaacggttcattctcgatgcattctcggccgtgaatgcaatttaacctgttgccgaggccgcggtaagcttcaataaccttgcaaggttcattaggttggtttatgtaatctgtagtagtctcagtcacgactctgtcgtacaactttcccaaacccatgcaattgtgggaaacacgggaagtaatggatactaagccacgcgaatatttcgaaggtcaagtggtctcatcaaaatttgcattccccgaaatttccattccccgaaatagtcagaatatgcggtcagaggtcagaacatctcgactcaatcggcatccgatatcccgatacagtcacgtgatataaaaccttctccaaaaattgcatctacggttccgcatctagataagtcaacaagatcatccaaccccctccacaggagcaaaagggcaagaaaaaaaataccaaaaatgccaaccccaatccccggctttctcctccctcgaggcccaccctcagcaatgaccctgcgcatcctccaacgccaaaacacccgacgcagcttcacctcgaccggcgccgcgttaaagaaagtcagcaagagcaacaccaatgccaattccaattccaaagctagcggcacttctaagccccgcgttctcgcaaagcccgacagattccgcccgccctcgcacccccagcgcctgacgactccatctccgaagaacgcacccccaggccaaccattcgagtatggcccgcggataacggagaaagagcgcatacagcagagcaagacgcagtacccgggcatgttcccgccggagggaacagtgatgtttaagttcctgacgagcaagtggatccacatttggattgcaatggtgagtttccgacaccaagctccgggtctaccaaaagcaaagcttccaggagaactcggtagatcaatcaactaatcaactacacagagcgtcctgatctcctgcgccgggttcaccttcacaactaatttcaaagcaacctcgccgttcgcgcacctgctaccatcctggtcgagtctgctgacgtcgcctttcagcacgatctcgcaggcttttgctgtgtggcgcatgcatgtgcagcacaactcgatgcgcgtgcgggagcagcgacaccgtcgcgttgaggatgcggagaagaggaaggagtatcgtgttgcgcatgggcttgagaaggcggagcctgagaagaaggatgagggtgttgaggtggattcgcagtcgcctgttgctgctggtgctgctggtgaaggtgcggaggctgcgaaggagtttgttgattgggaggggaataagaggcccgttaagaagtggttggggatttggtgattcttatttcctccacgccttggggtgggctatttcagtcatatctacgggtagtatagctatctaggtatggcatatgctgtgtagggtttggctgtgggtatgtatcgatgcagtcatacatgagggagcttcagacacccttccagcagcgacgttggtgtagatggacgttcaatccattttgtacattagtggactttcagtctacgataggaaggccatctcaacttcaatcgatctaacgataaagagaaacgatttaaccaaaaaacaacgcttttctccaaactccagaagtagcgacctatcaaatcaggtatcaaaagtcgcaaccttaaagtaatgctgtactttagtactcatacatgaaatggttcaaaataagacaatcattgcaccacaaccccctcaagtccctcaagaacctcctccccaacaccgcccttaccgaggacattcttaatcatacgtgcaataacattgcgcttgacaccaccccttcgcggacgccagacaccctcaacctcctcctgaccgccagactcctcgccaggccccgcagtagcaccaagcatattcacattctcggaattgggaatacccggctgagtgaggcgggaggggggatcgatcgagcggatcgatagcagtttcagagtctcggagtcactgctgcgcgtaacagagatagccaggacggcgtctgcgacggcgatttcttcgcggttaggatcgaagatgacgttttcaccgacagaaataactagcagcgttacaggtgggcggacagggtatgatggtgcggcggagagaggagattttgaagtattggagcgcgggtagagatactccgcggcggcccagtcgtcgtcgaagaaaggatcttcttcacccgtggacttgagtttcggtagcttagtgctgaggagggcgaggtgggttgtgagcgataggagggggagagggtatgcgagaggttgagagagtagtagaacctagggtatgacatgtcagcagtgatcaagtcatacttttagaaccccagaataaccataaaccgagagacagaaagcgattgtcaaaacttacatcaatatacaagcgccaatgccaccgcttgttaataacaagcctccctttcaacccaccggccatctccttcgaatccccgctcccaccagaaacagaaccaactagactctctcgcatcatctcactcaaaaacacaggcagggcatcatcgtctctaaacccggggatctcaatcgacatctgcacccactctccctgtcccgagacagcggcggagccctcctcgccctcgcggttcagtgcgtcgccatgctgcgccagactgcgcgagtcgagcgtgtcggctgcaataacggtcttctcgacttctgctttcacgccgacgatcgcctgcgtgccgtctgcgaatccgatgcgcgcgctaccgttcgcgccaggcaggatggtcgtctcggcagacagaggacggaattgtgtgggtgagcgaccgtctggtcggattgggttcttggggaggctgagggaggtgtaaaggtaggagagttcggcgggtgagaggtggggcacctgagaggcggaggaggcttgtctttgatttgacattttggcggttgtagtgttggtgttgcaggcgaagcgaaatagactgctgtatcttggaggatagagctggagttcggttgcgcgaggttaagctcgtagctgttggcgggcggttgattttgtggtgatcggcctgcgatttatgaaaagtgcttgccgggcgtgctggatgtgctaaggtgttggtaacccggattccaagctatggccagtatagtttcagctggcgaggttgaacgggggagcaattgaggaagaaaaaaaaaaactaggtagagtcgagcaagcagtctcaatcaggaaatcttgatgggcaacggatgatcgttgttccgttgatattgatccatgtaactagatgctgtgatttttctacattgactactccgaatttcgtgacagaatgaccatcttctactgtgtaatctaatgtgcatgaattgagcccagtattttagcccaaaaatcccaccttcccacgctgttcatcattttcatcgccactcctcatgccaactgattgataggaattctaataagcgttacagaaaacagcaggtataatgtctcaaaataaagtctcgagtatgtagattcaatgcgtatgtagtaagatatgtatgggcatggcacaacggccaaagggggaggtatattacaaatatagaacggactggacccaagccagcacgccgtgggaaaataaaatgatacaagaattgaagcaggagggagagctatgacaggaatatgtaaatggaggggataaataagtgatagaaaatgatggacaagaagtaaagatggggatggctgtagccagaaaatatacaagcggggagaagagggggaaattatatggacaaaggagagagagcgcaatattcatcgagaatgatttgcaaatgtgcagatccgatatacatatcggatgaagagagagggtgaggaatacctaataaggtaggaggaaatgcggtatatgatgcgacttgcgcatgtggtatcaaacgtcaaggaaagaacccacgcccctgctaaatgatgaaacgaaaggactccatgaaaaggaaaaaatcaaacggcccaaatccatctataaaagggctgcaggggtatgaatgtagagaaatgagaaacttgcccaatgcccatatgtgaaaaaaaaaagataaaacaccctccgaaatggccagaccttgcaaaggaaatataaaacccaaaatgcgccttgagctatgtagcttgctcagtgtttgttctgttttgtaattttgccaaatttttgtgctcttcgcaactgaaaaggctgtgctgttgttcaaatatagttggatccaggagcgaagtagtcggatttattgttgtgatactcggcctcctcgtaagggggagtgggccagtggcggcttgcggccatgggatcaatcttgtggatgttcaacttgctaggtgtcgactgttgaccaaatgcagcagtttccttggccgtgggtgacggtgtaggataagggttctgctgtgcacgcgagttgtctggttgccggcgagcagcactgtgcgagtcggcagccattgactgagtctgggccaggcgtctagccgccttgctggcggagtgcaacacctcatcaagcagctcatcttcctcttcaggagtctcgtaccgatgaaccgggtgagtggacatctgcatggcacggcgagtcctgctagagataggagcagggttgttgctggtgacgtgaggcattgactggcgcttggtttggccgtcggcagaattgttcaagtgcactgggacgttgctcagtgtggacgagtccaatgagtacttgacacactgaagagccttgtccagctcgttcaagtcggagccttgctttggatcactagtaggcccatccagagccactgatgaacggttcgaccaagggatgcaacctgcgttagcctcgacgtcatcattaggcgctgattggtttcgtccagacaatctgcgggcgcgtttgcgcagatgcgagaagaaactctcctttgtggttggtgtgctagtcccggaaccattgagcctcctttcggcctctagacgattctggtcgtagtgattcccatgggagttgagggacaattgacggccgatctttgagctagctgatgtactggaggacttggaagactgactgtgcgccaaagtggcattcgcctgagctgtaacggagttggagagaggggagacagggcggatagaaggaaggattggcatcggtgcaccgtttgcccaggtagctcgcttgatgttcggcgggcgcgccttgacaggctggatctcaggtacggtgacctgagtaacagccgatggccgggcagggctttcttctgcagaaggtacagggctgtctgaccgaacgaccaatgatctccggaaccacgaaggcttagaagacaatgtaggagagtcacctggggtaagatttggtgacctgaagctcttctcggactgcttgcggcccagtagtctcgatgaggtggaggacttcggccgcaccggatcaaccgcatcggcgaagtactcgtggttaagcgcttgggtagacgttgggcggttcttaggatcccacatgagacaccacgtgacgaactcgctaaatgccgcaggccacattgggggctgaagcacggattccatcgcgtgtggtgccatcttggggaatgtgaaaccgagcttgtgagccaggcgtgatccttcacgccactcaccaccgccaatcttagcgcccgacttgctgtaccagtttcccgggctacccatgatctcacacacacgccaaacttgatcgacctcgttacctcccgggaatagaggctttaacgtagcaatctcgactgccatggcgcccattgcccacatatcgactggtgccgaatactctcctgctcgtagaagcacctcaggtgcgcggtaccagcgtgtggagacgtatgtggtgtatggttgtttggagtgagtctcacgagcaagaccaaagtcggcgatcttcaccgtgtagacaggaggggtggagggaggggttacgaggttagagtagcggctgaaagcggaatcattgggggcggaggttgagacgagaatgttctcgggcttgatatcgcggtggaagaagtggtgtgcgtggatgtggtccagaccggacaagatctggtaaaggatgctcttgacgtgcttgccttcaaagtatttatggtcacgagccttcatcaactgatataagttgccatccatgtattccatgcagatgtgaagcttgtgagagtgggggtcgaggaagatgtcgagggcagggacgaggtgggggtgaatgggtaatgttcggaggaagatgacctctcgcaggtctagacatggacccaaggagtcaaatgtcttcttcattgttttgattgcgacctaaccaatgagtcagtgaagcccaatacaccaccaatcttgctattccataccatagtgcctctgcgagcgatatgggccccggcggtccgtacgcgcgcgactgccacgctaccgaagcttccatcaccaatctccttgatgacttcgaagcggtcctcgaggcttgccatggaggtatgtgacccccgggtgggcatatcgtatgtgacggtcatgttgatgttgtctcttcaggtctgccagcagatcgggagaagaggaatgcggaggaggggttctagaggggtgttcaggtcagcttcccgacatgcttgcaaggatccggcgttcttacaattatgtagaggggaaagtttcgtcgtatccccgagtgaatgtgtatgtatgtatatggatatcaattgcagcaaatgatcatgttctgagaatcagttcgagccggacggttgggtttccattgacggaaaagtaaggagtgacaaggtaattggagggggagtgacggtggtcatgtagtgggcgatctggaaggactgaggaccgggcacgatgcaataaaaaggaaaatccagaataggaggagacccgttcctggtggaaactggagggatcgaaggaccgagggtgagcccctgacgcggtgacagctcgagctcctagacggggccgtggagacggtaaattaacgactctaggtcgttgcagatcagtccaccgtggcgaaaacgggatttgaatacggaatctcttggactggagtataagatgagagcgtagagactagaacatccgactatccgaggaatgaaaataaagagatgaagaagtaggagaataaaagaggcattgtacacatccaggcgcatatagagggaataatcaatatcctcaatacggaattacgaataccgcagtaccgaaagtataaaagaaaaagaaaaaatcgatgaattaccaaaataaaccaaacagaaaaatcagaaaaatcgggaaattcccaagaaaaaacccaggaaaacagctaaaaccccaaataaccggttgatcccgtctcaaccaatgggacgctctttgtggaaccgggtaccttatttcaattttaccgtacgcaagctcaaacatgaacatggacactttgggaaaaagaaaagaaagagatgagaagtatcaattaatgattatattcaattatcgttgtcatatttacatacgttgtagtcgaggtccatgttgtgttgtatacaaactctatatgcctataacatctacgttgttcgatttatcatctgaccgctgtgaacgcacggcgcctaataattgaggaggttgggcataaataattgtgtgcagcctgtaaccgttgcccacgctctagatggtctgcactgtttgggatatgtcagcagttgggccgcgttggtaatttatttgactcgaacattagaattggccgccttgaaatatcacaaggctaaatactctaatatctccagatacaaagacatctgatcttgactttgatacaaaagtactatatacacactgatcacctcggttaccccgtctttgtacaagtcatttctagcggagatcttaggctctcggttgatgtaccagatgtacgatgtagatgcacgatgtaagatgtacaggcacaactcgcagattgggagagaaaagcaaggagaatctcttctctcctcgtctcatgttccgttatgtcatgtcctaccttcggacttatactctctgctagtcgcattctcgcacggatagtcgaacaccggtcttgttattcgccttcttacagatcatccctgtcttaatgcctcacctacaagagtacggagtaattcgtgctgacttctttgacgttgattgacggacatccaaccacctgatgtccgatctcctgatgtatcggaacactggagagagatatatggctatctcttttccgactgatccttcgacgggtagggccaatcacatactggggtaagatgctgccatgtggaagataattagtaaattaggttcgcgggtggacggaaaggttcgcggcatagaaaagcaggtcgacttaagccgcgatgagctaagagtcgcatatgatgggttcttttttctctttgtccaaaggtacacggtctgggccctggatgcctgggggatcattgacgggtttctccaagccgtctccgattgggacgtaggatttgcttgttgattcgggttctttgttgaaatcccgtctcgaagactcggatggtagtgtctctgttgccatggatgccggatccgtgttgacgtattacaaaattttagggtctaggacatcgtacctgtatatgtatggtctgaaaaaactccaatcaagttgtgacatgaaaatcagagaccaagcccattatagccactttgccggatgtctctaaccgcgtcactccggcttctccactgacttcaaagctaagggatgtttgtggtcacgataacaccgactttttgactctctcccacagtggagtacagagtacagagtatggagtgaacagatgtaattacctgcagaaagcgggatggaatgcacctgctgaaccctggggcgaccgttgtggccaaggatcccaattttatttggactcaggcggagttgaattggaagagcacttgacctctatttcaacgcatcaattggggtccactgtgtcaatgttcggtgtttgccccctaatccgatcgctgcatgggatttcaggaacaaaccttgggaagtacataaagtacacaaggaacacatctccaagggccgtaccgaaacgaaaccaaggttcgaagagagtgggccacttcacttttcgctttttcatattttttttctcttgaccgcacaatttgattactaggacaacaagctgcgacgtggagtacacaccgtgtacaatatacgatatgaattgtacacggaataccgacattcacagcacatgttccactctctcccactttctcccaccttcgagtctatgattcgctcagtggcgctttcaactccacgcgcaccaaccataaaccaatcactacggaccaaagatcagtagtccgatggagtatatacgccaacaatgccattggtcccagcagcaaagacagcccacttgatccatctatcgtacctatgacgacgccttcttatccctcacaattgcctagtcacgcactgttgattcggggaactgcggaatgctccaccgtgggccttcatctacggagtaggccagtcccaactacccgcggagaccgcgatagggggaaggatcagtgtcgccacctgggaaagcaaactagcatttgcttcccaatctgccgggaggcgccgtggtgttcttttggccttcgagaaggcagttcctgggaccgatatccggatttattgcgcaacggtctccgaatggttatcttgcctcaaaatggggtgattattacttagacctgggacttttaatgcggaagcttgtcgggagcaaatccgcagccaatctctggcctcgttgcccccctaacagccaacccccccttatctagggactaggtaaacaaactggccaacgaacacacgatcaaacggatatgcgtcccgaacttcccagggaactgcatagcgaccgttgggaagttaccaatttcgaggattagcacactaccgtcgacactaaacctcctcggcccacttcaaacgccgaaagtctgtgttggatttccagaatccgtggaagccgcgggagggacacaccccttgatcgctggaactgtcagatcggagtccagtagattatccgtcccagctgcacacgagggcactaaattagcttgaattggccctcggtgctgcgtagctgagttgttttcattaaagtggacccactgtcactccagtaaccttagatttatatgaagcttttgcgcattgggaaggtgtggacaacatacatgatacagcatacaccgacagacagcgcggagactttcacccagccaactcgcactagccctcaatggtacctatcgtctccgtgcacagtggcagtgccacttactgcatgtcattcattcattttcttcgcattcaaatctgattctcggtatatttagatcgcccagctaagccgtgatgtcttgcgccgcagtaatctatctaattgcgaagtgatagatgcccctcctcagttccttaccatgtcgtgctgcccaaaatgggtctttatgtgtgtcatacctgactagcttatttcatttctctggggactaatgtgcgtggtccggctggctttgaaactactccgtagcccctatattaagttgtatgtaaaggcaatcaattatgctcctttgggggccttgctccgcttcttctatggttttctagaaatcaaatagtctgctctcagctgcacgtcggtgccttaagtgagctgagaatgctgtttatagttagtactccattttgaggcgtcgtaagaggtttcttattgctctgctaagttaataatgtctataccccgtaagatggccaattatgccatatgtttgtttttaaaaatcaataccacaatctttgaagagcaaatctcttatgcggccttggtactccatactctgtggtgtttttagatctatcccgccctctccccacgccccctttaatggtataagaattggtcgcaaattataaatagtgtaaatagtgtaactaaaaagcggtgccttagatggcagtgagaacactgtctgattcaatgtcactcctttttaaacgtttgctttcttactatctctattgccgtgctaggcaatcgacttgttatccaagctggccctgatatgctgtatgtttgctttctataacacaatgcgcattatatcgtttgatcgatcacagctttgatttgcagaatctgcatggtatctatatacttcgctattatatatctatttcagacaccctcaattgaacctcttctcttagtatcatttccactttcatgccttcagaccttgttgagcagagatctaaagccaaaaaaacaagcaagacaatgttcatgatggaaaagcaaattcgagatgattgaattggccagtacgaaatcctcacttccggaaagaacaacctgcgcagcgcgcgcattgcgtctgcctcgccaatataaattggatattgtcttctctctcgttttttcttcctcgctcaccttcactgcactcactcttgagacctatcctgcgaactttgcaagtctttaccggagtgtatcgtctttctgagatactaccatttcaccatgcctccgcgacggaaacggctccctgcgagcccatttgcacggggatacacaccccaaatgagagcggcgtcagttaaccctatctcactctaggaagcaagatggtcgctaacaaaatatcgatagcgtggaccgaattccaatcccaaacgagtcagtattctcatcagtcttggccttcaactgctcaccgtcatagaattaaatgctgcgtctgcaagcggcatcgcccacagtcccagtactcgaaaaaccaactgggctacctccgccgggcaatgttcgatcttggctacaatagcatttatgaccagcaggttgctaagtgtggcccatgcacgaatgcccaggtttgtgaggagctctgtcatcgttgcggtcactaccgtgccattgaccaattcgccagaaaccaacgcaatcgcgacagtccggtatgtttgtcgtgagctacgcactttggctgcttctaatacttggtcgatctgatagatctgccagccctgcatgaactaccagatgtccctcgatcctgccgatcagcctctggcgatcacggacaaaaccgtggttgaggatcaggtagaggatgaggatgaggatgaggatgaggaagaggagctcaattctgagtctgtgggccattttggatccattggacaacccgagtctgtcgatatctttggctctactggtcaggccgtaagttatcagaacgacatcagctctggtcaagtcttggtttactcatactttgaatgcaggagagtttagagcagggcatcgagacagctctcgtcctgcacgatgattccactgatagtgatggcaatgagagccggaacggatttgcaagagtcaaggtgggtgcctccatttaacagaacttatatcgctccggatggacttctaacaaaactttattgtataggcgcaccgtcctcgtcaggcgcctgtccctgagcccgagcctgccccaggctgggcacccggtactcgcaagatcaatgatggcactccttggaaaggaggaaggtatctctaatggtttccaacaccgtgccacgaacaaccctcgggttatgattgacgatacttctatctatgggcacctcggctgctaggctgcgtctggtgttgcagtttacggcatgctcttcttcttctacctctgtagtactcctagtttctcacttgcttttacttacagacggttcgacttcagggtctgcccatgatgtctcctatgtctccagacgctctttttttgctctttcctccgggaaggcgagtttctagtattccagccctgtgcctggtgcatgtcttacgggcaacctttctcatattctgattgatggggcttttactacagggtggggtggacttctaagtccgcgcctgatataaccttgtccaatgatttttctcgctttcttttctggggtcctagggttgatatgtttatgaagacccattagattcaatagtatttccaaggtttgccttttgagctcccatgggtcggtagacaatagtgccatggttatgacatcggtggttccgttgactccacctactataaatattgaaatcagcagcttagcttgtcggtcgagttattgtatgataatcgatatccaggcaagttccagctatttctggtgattgagaactggaaggcagtggctaataatactctgttctgtcgatcggtgtcccagccgtcggatccgggccgacatttggcaatgacatagccctatctttgaaatagtgcccttcacagctctgataggcgcaagggaaactataatgtacacattgcatggaagatgcatgttaagtctgcagcggttgctatacactgccagatacatgctctgttagtctgccgatcgtgtgactctgacccagtctagcaatatgaaagagcatatgtgggactttaatatagcaaagggccaatataacaaagagcgaccgtgtgatgtgacgtcgagacagtacaaagagaatgaatcttaaatccgtctcactcgtagtgacgatatgatcgccacaacgtttcactcgccccccactagcccctccaccgtaatttctagcaattcgtaatctgtgtgcgcttcttctttctagttattctcttcaaatcggttacattttgcaaggagaaactacacgtctttgctaaagagaataccccggctacatctaaaccctcaaacctccgtatggcctccaatggaaattacacgagcaatacagaccaaacgggcaaaatgaacccagactcaaacgagcatgggtacttgcccgcacgtccacttccatcctattatacaccatctcctcagaacatgccgcagccacagatgccgccgactgggtcatcggccccaaatctaaccccagagccatacaaccattcggaatcccagcgctcctctccaaacatgcacactgggcacatagacaatgcagtgagctctgcatttcaaagtagcggctccacaggctacctttccccagaaattatctcgcagatcacagcaacagtgatccagcagcttaaaacaaatgggttggacaagctacaagggtccggtgcgcccccgcccggctcgcaatcacggcagccgccatggcaaacagatggctcgttgcagccgcataaggagactccctctgccatacctccacagcgaagcagttcaatccccccgcccacttcggcctctgaaaagttccatactgggaattccgagccatacgtcccctctagttacgctagtgacagtcatcccagcccgaaacctgctcctgatccccatccatacgtcccttctggttatgctagtgatagtcatctcagcccgaaacctactccagatccccagccatccgtctcctctggttactccagtgatagtcgtctcagccggaactctactctcgatcacctgtcggatagacgtgcctctgtctccagtcagactagtgatcggagtcatcctagttactataaggcggaacgtccgagacctccggatcgggacgctaccgttatggagatgactactttggagcgaatttgggggaaattgttcgatgatggcaaggcgacgaagaggcttggccaattcttgcgtggaattgcggttcatatggtaggacttttgtctactctgacctactacggattataatggctaacttgagtagattgaggattatccgccgggaaacacccttgtcattcccccttataagttgcaaaagttctatcgtgacactcatgattcgaatgacccttatccatggcaaggttggtaattcgatctgtttattgacatgacatattctgactaaatatttagacatttttgatgatcgtacatcttcgatctcccgactattccgcgacatcagagtcgaacatcatctcatccaggacgatctagcaaaacgcccagatatcccaggcttaacacccaaaggcttcgagacctgggaaaccttgatgatcctcgcgaacccagagcgcgaatacgagcgactgcaaaaagcagtccgcaacatgcctatcaacaacccagaggaccagaaagagcgcttcccaaaggaaatcccgcgtcggctcttcccagagatcgcagatatcgaaatcagagaagacgtcgaggaccgaatcatggtccattgcggcgtcgatctaccatacatcacacccgaagaacgcaaccagacttctggccggtcggccagatcatccaccacgaccggatcgcccggagagcgaacccgctcatacgagagaggccgacccccaaccgcctcggccccaagacctgccgtagtcccaagacccgcctcagccgtgacagacgatgaagacgaagaagacgaagaagaagacgacgaggtagacgaaggagacgaaaccatcacctcggtcccgatcgagcgagaacgcaatccctacagcaacagtccaagcattggcaaagtctacgatgaacccagtcctagccacgaccacaaccacagccacagccacagccacattggatcgacaccgggacaagctccagcataccgcatgcccgagtcctacgaccgcgagtcgcaatacgcacgctcggggtctggacattcctctgagaagcggttctcgcatgatccccgcagctcgtcgcatcaccgcggaggcagtggtacctacaggcattcggatactgaattgcatggtcgtgaccattcggctagacattcagggctttcggcgcatgatctgtcgtataacgagcctgctgcgaatttgactgaggatgaggcgcgcagatatcgccctagtcggggtggcgacgaggaatattatcgtgggagtgggcagggaggagctgtaccccggtatgatcagaagtatgaaaagtattacggatgaatgtggatttggattgatttgttttagtgttttgggttgcttccttttggcgattattgcattgcagtcagtgtcattttcctgttcttctgcctttcatctcaactctggtcttaattttgattcttttcaagctgggcgtggcatggatccgaggatacccctttttctggggttgtgcacgattaacgatatcatatttcacgacgttctgctctttcgaaatacacgtgagtttgtaattttatcaatagcatcgagaatgaaaaagtgcagcgcatactcaagttgtattcgtctcacttcgacctctcaaacccaaacttcctcataaccctctccccatcctctctaatctttttgagctccctctccctctccctctcttccttctcatactggagcgcaatagccctggcatgtctctcctcacgctcaacccttttcctcgcaaccctctccgcgcgcctcttatgctccaacgtccgctcatcacatctctcagcatcatcgcgcagcgtctcgacctcctcatcggtcaatacccatggcacagacaagacttcaataaggaaccgcaggcgggtatccaggaactgcatttcggcgttcgtatcacgcacaagccagaaccgctcaagatgtaactgcatctgcgagcggaaagttgacagcgtcccttttacccggactagcgttcctggttggagagctgagatgtctatcttgttgtggtctttggaggttacgtgtgttgtttgggtgaggctggtggctgttggcgccgtgagggagaatgaggaccatgctggttttcctgggcctgtggctggagtttcctggctagtggtgccgggatttggtgaggtctgctttagtacggctatttcgattgttgcaccactgctgtcgtctagtattaggattgtgcgtcgtgggacatcagttcgcgccactatgatgcccactaggctaacaaattggattggatggttgttgtagaagaagatgttttggcctgtgggctttgtcagttatgaggcttttgatgcagaaataggcttggttgtgttttggtctgatggaggatattgagtaaaaaagaaggcatatttctgggatattttggagcccgacagagtattggaacacttatagagttcgggtataatgaaaccgaagtctaaacagcctggtggatgtatcgaatgaacttattacgctaacgccgcctcattatcgagcctccgcgctagaggacccggaaatatgcacatgagcactaggtgtgtcgatctgcagggggcaggctcaaaaaaagaaataacatacccacgaagtcactcgattttcggagacgatgcacatcggccgcacccattttcacccaggtaaagtgcgtgggtgacgccttgaagcagaacgcggggtagaatacgaggttctcatggttgactattgtcattggttcatcttttttctcgaagtatgcggaatcaggacttatgaatctcaacttgggaatgtcgatttagggatcaggagtaggcatccgagcatgagttaccgctcttgccgacacctgattctgcctaccacttcccacaccgcctttgtctagaactccccagtagcaagaaagagaccgatgtcattatccaagaagcccttcaaccagcctataatggcactatataattgctggtttctagcatacccacaatctctatagatagatatgcttatctccgtccatcatcctcttcatgggattcctcggcagcgcctcctgccttttcctctcctcagcactgatatcatcaacattagtctccttctcccccaatgcagcccttacctcctcccgcgcattctcatgccccgcaaaagcaacagtcaagatctctctctccaacccaccaacatgctcccactcaatgcccgcctgagttaacatccgacatccctcagactctccaacaaacgtgccaggctccttaaccccaaagtaaaccttatggaccccctcccgtccgccttccctcgtctgcgtgatacgctgcacacacggtgcattcccagacagccgcttcccgcacggctccatggtcacgtacatgacgagcttgcggccgggctcgacggggaggacttcgccgactttgtcgtcggggactttgtgcactgcggcatagttggcgaagcagcattgctctgcatgtgtattgcccgcgagctccattgtgtaccccgtcgagaggatccggtcgtctgtgaaggtggggtcgtcgtctttgcgggatagtaggactgcgccgactcggaagttggtgggtcttgggggggatttttcagctagagagaggcattcttttatgtagggtatgtgaggggaggtgtttgtcgtcatggtgagtgatgccaattgcgattaggctgggtgttcggtgtatgaggggatcaagttgcgctttagatgtaaaatttggattttgaattggattcggttggtccctgtagttctaaatcgaagagagtgaagtggcgctgtcgatgagcttggggtgcttgataaaggcggggagcagcagcaaaatgacgaaatggcccgtcgcgtcgaaatcgcgttccatttctacgaccttgtgcagtcgccacttctattatcaattaaatccaagttcagtgtaatatacctaggtatctaaatcgcactcggttcttcgtctggtgtttgagcgcccaaaaaaagcctgtcgtgtcaccaaaacttgcaatggcgaaaaacacgaaaaacgaacaccatgcctcagacgaagaaatgccgtctgtcgaggaagatctttataaaatcctaggcgtttcatccgatgcaaccccagaagccatcaagaccgcatacaaaaagaacgctttgagacatcatccgggtatgcaaacccacgcaggttcgaaaacagcatgctaatctcagagcagacaaggtgagcgaagaagcccgtgtagacgccaacgcgaagttccaaagaatcgcactggcttacggagtactttccgacgcgcgccgacgaaacgtgtacgaccggaccggcagcacggacgaagcctttagcgaagatggcgacttcaactggatggacttctaccgcgaacagctctcggcgatgctcgactcgcgggcgatctcggacttccagaagaaataccaaaactcagaggaggaaagaaaggacctgctcgccgcgtatgagacgcacaaaggcaatatggatgccatctacgatactgtgatgctgtccaatgtactagacgacgatgaacggttccgtggtattattgaccaggccattgcggatgaggaagtggaggacttcgcgcgatattccaaggagcccgagaagaagaaacagcagcgtgtgaagaaggcgcagaaggaagcgcgagaggcagagaagttgggaaaggagattgaggataagaagaagaagaaagctggggctacgggaaagagctcgaaggctgcggcgaatgaggatgatcttctggcaattatcactaagcgccagcaggatcgcggtgcgggcttccttgctcgtttggaggagaagtatgcgcagcctgggaagaagcgtggtatcgatgatgagccttccgaggaagcatttgctgctgttggggctcggaaggggacaaagcccaaagcgaagaggaccaaggcctgagttagggtctttgtttcctgcattcatgtgtcatgagcgtttgtctattgtataactaggtctaatcggtgtttgtaattgcataccactatatccttcttcttactgacatgcaaaaaagatgtacaaaaatacattccaaaagacatttgtagaaggcgtctgcacgcagccaccgcggctgcagtaagtagcctcatcttccaaggttgggctccttctcccaatctttcctcttagtcccttctttatgttctttttctttcaatctcaattacagatagtgcacaaccatatccagtccgtaactaagggacgtcgacttgattgacttttctggccatttgagctgtcaagctgtccagctattttcttgaattcttcctactcatgcatcacaactaaacctgacatacattcctatcaccgtcataaaacaaggcgacctgctccacattcctcattgcttggcggagttgactgctgagtttccccacagcccggaggcggtgccgccatgtcgcaccacgctggtcgaacttctcccactgaacaactgaaaagtttggatggtcgatctacaatatcaacgacctcaataaaggaaaaaccacctggcctgaaccgtgccctgcagaacctgctgattgccccgcagtctaagagtgcgggcgggacaacctattcgcccagagcaggcggaacccgcagtccagttgagccactggtatcatcgcctttgcgcatcagttattcagatatggcatccgctccaagttcgccggagaggcatgccgcagctcgcgaggttttccctcgtagatcatccgaccaggttgttgacactgtccgctcgactacgggtcgcctcagtactgatgatgatgatgcgaaatctgatgtcactactacttccctagagcagccacacgccaaaaagcgatttttgcaggctagagataggtctcaaagccgcaagggtgtggctgccataatgtctggccgtctcttcccgagaagcttttcccgtggcagagacagagcctcatcacaaggaccttcccagcgtggagcgtctcttgactcccgttctgcttcttcgccggagcggggtcgccccagtctccctagtagtcattctgttcacgttgaaaccttaactcccacctctgttggttcagggaaggggaaatcactgaacatgcacgatgcattcaacaagtcagacgaagcattggctaggccccatggaagtggaagcctccctgattatatcaaacccgctgtggaggagggaggggagcgaatagccaaggatgttttcgatcgtgacaagaacatgattgaaagcagtgaagatgaagccaacgacacttcgagcgatgaagacagcactctggagggtgtacgaggccgtaagaaaaagaaggactcggatatcacatccataacaccaagcgactttgagaaacccaagagtgacgattccaagcagtccgaagaacgtacgttgccttctcaggactatgttaaatatgaaatccattgtactaacctcatattttataggaaaagtttccggagttccaagtgaacgacaggagaagaaaccgcgaaaatctgctttgaaagctgtggtccatccacagaccagtttcgacatccccaccccacgtgttcagtccatcgccggcacaccttacggctcagaggatgaagccgagattggtgacattcatcgtgcccagaagctcagtatttccatgtccgctattgataacggtgtttacaaccgatccatccgaacaattgtccgcggggacttcttaggtccgcaggatcaaggcgatggtagccgtcgtcgccgtcgaaaatacttaatcgcaactgacttgagtgaagagtcggtatatgccctcgagtggactatcgggacggttctgagagatggcgacacgattttcgccatctacgccatgcacgaggactccactactgcggcagcggtgcaggtcggcgagggagctagagtgatgaaagatacaactgctgtcgttggcacccagacgaaagaagccaaccagaattatggatcccgtacaatccttggtcgacttggccctggtactgccagcaagacacattctgttgattcccgagcatcgtcaatcgccgaggcagaacgagtgagggcagttgagactgtatctcagacttgtgtgaagttgctacggaaaacgctcttacaggtccgtattgctgtggaagtgatccactgcaagaatccaaagtctatgattactgaagctgtgagttttttttctccgttctcaaccaccctattatctctggtccatgcttacaatgactctcagattgatgaacttgaacctacactcgttattgttggtgctcgaggtcaaagtgcactgaaggggtgagtgacgatttctaatccgatcttatgctgctggtgacaatactaaccttacttttagtgtccttctcggctcattctccaactatcttctttccaattcctctgtgccagtaatggttgcacgccgaaagctcaagaggcacacgtggaaagacaagctcaagggcactgcacatgtgcgcctatccaataatctaattactccgaagagtctttctcaagccaaagtggattgatctggtgtgctttttttttcatgttactctctggcttgtcttttcactcatcgggtccatgcaaggcgcctatcttgcactgcgtttgaaggcgcattagacctgggttatcaatatctctatttaacgcgtatggataccctacttttcactggctcaggatctcacaatatgatggctctttcttagtttacttctcgttcttaacctgctcttaatttaggtcttcgacattattgcttgtggcgcaatctgctcttaattgcttagacaccttgaataacagtactttgtataatgtagaaaacagatatgttcctgactattgcttcattcacatgtaactatacctttgcgccgggcttcgacccattccaagttgggcttagctgggcctacaagatagggaacgagcacctaaacgccaagacatgacccggcctacgcacctcatcacgtgcaacgtcaccgcccaagctcccccatcgagacagctggaccaaccccccagtcccacctttgctctattccccatccttgcatttttctactctgaatttcgcccgtggaggatcagattcgctatggccgactctattgacccccggatgccctccatcaaaccccggttccgttacaataccatcggaggcattaacggaccgctggttatcctcgacaatgtgagttgacgatgtcctgacaatgaagcgggaactgtatgctaatgataaaattgtcaaacagatcaagtttccccgttataacgagatcgtgtccctgacgctccccgatggcacagagcgcagtggtcaagtgctggaagccagaggtccgttccccacattctgccgttccgactaggagtatgaaagctgactgctatatatacaaataggaaaccgggctgttgttcaggtgcggactaatacctcgtcgctaacatgaaagactttgaattaacgtggctcgtttgtgaattaggtgttcgaaggcacttccggtatcgatgtgaagaaggtacaactatccgttgaaatggtttgaatatgtgctgacatatcgttagaccaaagtcgagtttagcggccacagcttgaaacttggcgtctccgaggacatgttgggtcgaacattcgatggctcaggtcgagctattgataagggtcctaaggtgttagcggaggagtacttagatatcaacggccagcctatcaacccctactcacgagtatgcgcactttcaccgatctaagatggaactacggaaagctgacgaacggataaggtgtaccccgaggagatcatttcgactggtatctccgctatcgatacgatgaactccattgctcgcggacagaagatccctatcttctcggctgccggtcttccacactcggagctagcagcacagatttgccggcaagccagtctagctaagcccactaaggatgttcacgacggccatgaggagaacttctccatcgtcttcgccgccatgggtgttaatatggagacagcccgtttcttcaagcgcgacttcgaggagaacggcagtatggagcgtgtcactctattcctgaacttggccaacgaccctactattgagcgtattattactcctcgtcttgccctgaccaccgccgaatactacgcataccagctcgagaagcatgtcctggttattatgactgacatgtcggcctattgtgatgccctacgtgaagtctctgctgccagagaagaagtccccggtcgtcgtggttaccctggttacatgtacacagatttgtccaccctctacgagcgtgccggacgagtacagggccgtaatggttctattacacagattcccattctgaccatgcctaacgatggtgcgtttcttaagtcacactttcagcgaatacaactaacccataccttcagatatcacccaccccattcccgatttgactggttacattaccgagggccagatctttgttgaccgtcagctggacaaccgcggtatctacccaccaatcaacgtcctgccatctctatcccgtctgatgaagtccgccatcggcgagggccgcacccgcaaggaccactcagatgtgtctaaccagctgtacgccaagtacgccattggtcgtgatgccggtaagcagcccacccttccacatcccacaaacatctctaaccactccaaccagccgccatgaaagccgttgtcggagaagaagccctctcctcggaagataagctctccctagaattcctcgagaagttcgagcgcaccttcatcagccagtctccctacgagtcgcgcaccatcgaagaatccctcgacctcgcctggagcctcctccgcatctaccctagggaactcctcaaccgtatccccaagcgcattctcgacgagttctacgcccgccacgcccgtaagatccctaacaaggatacccgcgataactcgcatgagaacttgatcgacgcatgaggaggtgatgtgtgttgagctgaattctagggcttgcgcatgttgaattaaagtactgttcttgttgtgcggctgttcttatcttttggttgttattttctttctattcttgctcaagcatgatacattatcgaatctatttcaggggctattctggctctataaaatcatgatcggtttgttcatcggttccgtgtgtatagaggtcttttagaagtggtgggtaatagactgctattgttctagaggttaaagatatctattatgaagacagtcccgaaagatgaagaaaaaacaaaagactaaggggatatcaatttttttattttacttttacccaaaaagagtcgccaatcagaacgcttttcccaaaaccatctcgcaatgtagagcataagcatcaaggcatcatgaaacctctctagcaagacagaaccaaaaataaaaatgaagacaatgaaactgtgaaaggtatttcattctatgcaaagatcgaaaagcgctcagaagcgcagatcccagccgatcttagggcccaatcgaggaagctcgtcggcgacctgctggacatccttgtcaccgcgaccactcaggttcagaacaatgttctggcccttgcccattgtcttggcgacttgcatcacaccccagacggcgtgcgaggactccagggcggggatgataccctcgtgttgggcgagggcgcggaatccagcgagggcctggctgtcgtcggcggcgatgaaggtggcgcggttggtatccttccagttgctgagttcggggccgacaccggggtagtcgagaccagcagagattgagtgggtgtctgagatctgcccgtgctcgttctgcaggacgtaggtgcgcacgccgtggaggacaccgtgggagccaccggatagggtggcagagtggcggttggtgtcaatgccgtcaccagcagcctcgacaccgatgagcttgacgcttgggtcattggagaaggggtagaacatgccgactgcgttggaaccaccgccgacacaggcgatgacggcatcggggagtttgccaatctgcgcctgcatctgctccttggtttcgttgccgatcacggactggaaggtgcggacgatggtggggaatgggtgggggccgatggcggagccgatgatgtagtgggtggtgtcgagttcgacgacccaggcgcggagagcctcgttgaccgcatcacgaagagtgcggcttccagcctcgacggcaatgacggaggcaccgaggagcttcatgcggaagacattgagaccctggcgacgcacatcttcagcacccatgaagacggtacactgcatgccgaacttggcgcagactgtggcggtagcaacaccgtgctggccagcaccggtctcagcaataatgcgggtcttgcccaggcgacgggcaatcaaaatctgtccaagagcattgttgatcttgtgacttccagtgtggttaagatcctcgcgcttcaaccagatgttggcgccgccaacgtggtcggtcaaacgctgggccatgtgcaggctgctgggacggcccatataggggtagtaggagcggaattcttcccagaaattgggatcattgttggcaatattgaagccgtgctcgagctcggccaagcaatccataagggactcggggacatactgtccaccgaactcaccgaagcgcgagggctgggcagatgcatcctttgtgacattgagggcctcgagctggtcggcgagaccaggtccggcgggggtgtcggaatcggtgatcactttagtaggttgaacctgagcagagggctgggccttctgaatggcctcgagaacattgatctcgtgagtcagagcaccggtggcatcacgctcacgtttgcgtccagtgatgctggaaaggtactcctcggcagccttggcagcctgcccagcaggggccttaccaacgcaagtgataatttggctgccaatgacaacaccctcagcctgctcctggacggacaggaagtgctcacgggtgctgacaccgaatcccaatgcagcaggaacgttgccggagtattcgtggacgcggtgcagaagctcggggatgtttgcgctcaatgaaccagtggcaccggtcacacccatgcgggagacgacatagataaagctgtctgcgatcttgcagaggagacgcatgcgagcatcagaagtggcaggggcgataagggggacgtaggagagactgaaattgagtaagcatgctgtataatcatagacaaatgataaagatttgaagagtaaaaatcaaggaactcacccagcgcttgagcaaaggtcacggaaacggacagcctcctccgggggcaagtcaaccatgataaaaccattgacaccagcctccttgcaatcacggagcatacgctcctcaccgtacttaaggacagggttgaagtaacccatgagcatcagcggggtctgcagaccgcggctgcgggcagtgcggacaagctcaaggacggtagtgagggtaacaccattctcaagagcctttgtgttagcggtctgaatggtggggccatcggcgatgggatctgtgaacggaatgccaagctcgatgatatctgtgatatgagaccgaatgttagtaaaggtcatccctttgatcaactttcactttgggttgaattaccggcgccgccgttctcaagaccgaggagaatatcaacggcctcctcaacggtggggtatcctgcggtaatataggccacaagggctgcacggttctgtgccttgcacttcgcgaaggtctgcttgatagcttccatgatgcagggtaatgtgaaagtggcggggcaaaagagtgtggtgagaaggaagaagagaagaggccaatgggaggcaaacgatccctatatatacgttcagagatgggatgcgttacacgttaattgttaggtcagggatggggtgagatgttataaaaaagcaaacgatctgtatgagtcaaatggaattgttctttttagaggccggtttcgctgggccccgcgtgtcacgtgccttgataagatagtgagtgtcacggtttaatgagccttttcccgcctttttctgccagctaactaggaagagagcgagggtatgagaagaaaatgttatctaaaaagatttctaataagacttatatcaaaaagacatgagaatgttgcataagccgctgactattcctgtacatagtagggatgatgtagggctgagatttccacgtgatatgctctacatccacattctacaagagaaggaaaagtgaaagaaatttcatctgcaatgtaaaaaaacttttactcggaataggtagattaaggtagaagataaggataatgaacggcccaaccgttcaggtcccaaacgccgtaacaatgcagtaggtaggtagtaagtgacaacaaccctcagctgaaataacaagaagtggtaagtaccgaatgaactccagccaaaattttcaaacagagaagtgaaaatcaaatagggaccatgggaggaagacccgagaccacgaagagaacttcatagtgtcagagatcctccacccaagaaccccgtccaaaaagcaccaagcaattggatgaaatggacaaaaccgccaagattcccaaaaaagaaacccaaagtctatcccatttccaatccaagaataacccgcgaatgcaaaaggaatgacaagcaagcgcccgctatgctgaatggtagtacaaaagcccagaatgtatgttttgtgcgcaaaaaagggagtggaagccacaatgcccggcatgataatatgcaacccaaggaaggaatgaataagacaccgtatagatgcgaggaagtctcaagtaagacaatgtccaaaatgtcaaaaaaatcaatcgcaggaatgcaaaggccgcatgtttgggtgtatggttgagggcatgaggcatcataatgtaatgtaaggacggacgtgaatcatgatcaaaatgtgggatgcgaggttcggcagataaaatgtcttttgataccttttcaggtggaaagagaccttgtatcagacggacggcaacccggtgtctgggcttggtaaggagcgacgtgaaaaggaaaatcgtatcttcaaaaaggcggaggggaagtatgaaaaatagaatggaagaaaaacgcagcaagaaatcagataggaggaccagccagcagggggatcagtggccgccgtgggcggtgtcgtgcacggagtacacgggatccaagtaggtatagcacccgccatttcctggtgcaccggtgtgaggagtgttgtggccgagagggtgcatgtcccaagatgctcgcggagccgcgggtggcagaccgttctgatggctcatggctggatacgagtatgctccagcagatgtatatggctgggacactgcgctcatagaccggatattgggtgccgaagacaggtgggaggagtggtctgcctgcgagtaggtctgcacgggcataccatggtagctgtggccagcaccactgtcggagatagactggggggagttggcagtgtgaggctcggtgccggaatccgaaccagtgccatgactggcatggctggtataggtggtggtcattggtgtggggatggcacttgcggttgaggaatagctggcagacttgatagaagagaagattagtaatttgtcacaatcagccgataagtttcaacatacgtatttcccaatgatcttcttcagtgcctggctcaggaccttccaagggaacaccttgacatccttctcgatattgcggggcttgggggcggggaagcccatgataaccttgaagaagtcttcgctctcgaccttggccttggagacggtgagggggcggaatccctccaagttgcgacggatccgattcttctcttcaacagtgaagcgcacagccacgagggactcgagcagatagatggtgtcgacactcgttacgtagcactcattcttgtcctcccatgaaatgcagctaatgcagatactgttgggggcgcgatcgtcgggagaaacagccttgaactcgccctggatggtgctgccagtttgagagcgggtgaattgcaccaggcgacgtcggcacgcgcgttcctcctttgtccagccttgtgtcatagtatcgagatcaccgttcaacttgaggatagccttggtgggatatatggcatagggattgaaggctgggttgtggggcatgctgtgcgtttgcatggtggaggtacggatcaaagtgggatttgaaggaccacgctgggggggacctttgtgctgaggaacatgtgtcaaggcgagaccgttccgagcatcattgctcacagagacgaaagaggggctccaagccggggtgataggggaagggacacggagggcgggctgggaggcggcagatacagaagagtaatggccggagccagtctggggagaggatgcagagtgatatggcgcgacaaatccaaccatggcgggaagaggctggaggtaaggcgagtaggacgctgatacagagcggccgtggtagccctcgtggtgctcaaccttggggatcacggatccgttgtgtcgtttggcagatgccacaggagcatcagagtatgaaaacttccgcttgcgggaatcccctgatggcgaagggtgggaagcttgctcataagtgtacacaccaacctggagagaagtggcgggacagtcatcttgggtctccatcaagacggacagaggaacagcaaaagatggggatccagtagacaagaatgcaggcacgtcagccgagagaccgtactggaacgcagagtcctggaatccgaggaaatgtagaagcgattcacacttcttggagccaaaaaccacatacaaagctgcgtatgaggaagcgtggaggtcataggggcactggatctggaccatcaccctagttccctcacttccccgctgggggctgtatgtcacaatttcgggtagctgacggtggcgtgcacccatcatgggcgactgagactcttcgtacgagctagcgtactcgttgggcagatacggaacacagtccgagatctgacttgcctgatcggccataggcgaggggaccatggcggtcgtcacataaggcgattggccgtagttcgagtaagaggcagcatcatgcaaagatcgagtggaaccgtaatctgtgtttggtctcagcacacgggatgttccgtcgcaaaccaagttcttcagctgcaacgtacctgtgatggcgccggcaacgggcttctggaaagcagacatggacaatatgggctcggacttggcccacgggccgtctgaaaatgcaccgataaactgtgatccttctgagtccgacagatccaacgactcgccgagtatgagaggcgtttgaaaatccgggtcgaactgtgacggaagaagaaacaggtcagcgggaaggtttcttatgcacacgggaagacagaatgcagtagaagattcaaacagaatgctatgctggaacacctatgcaaaacatgcgggcatccacaagagacaagtccaaagttaggctgggaatcttaccaaaacaccgtgtgtcttcgaataagccagcttgaagatgttgcagcgagtgcaacgagacagaacctcttgaagcgaatgactgggaatttattccaaacgattgtagggtcgaaaagcacaagcaagaatggagtgctctccgagacagaacgagcgacgagatgaagctgctgtcggtctcacaaaaatagcggcaacaaaaggcctcgaatcaccatccagcaatcaacgactaatgctgaaactaggaacggctggctgcagaaatcgactcagatctcgaccgtcgtgcccgacagttcataaagagaagccgaagaactagtcgcttgacaggagctgtccaagaaaggtccaccgccaattgggacgggagagccgagattggtcggaggatgacgagcaacgagcgtggactggcgaggtttcgcttttctttatttccttgatccgtgaggtgtttcgggaaagactttcagcagattgggccacgatgaagcagatgcagatgataggctactcaattaatgagtatacgagaacgttttcagactataggaatcggatgggtgcatagggggaatgaactcaccgagatgaatcaaagtgaaatagaaaaggaagctctgatgtgaaaccaaattcggccgttgactatcccagataatatgcaagatccgagggtcgtcaaacctgaagagaaagctaatgtcaacaacaaacacttgaccagagcgggacggggaagccatccgacggctttgacaactatcgtcatttccagtcgttggtatagttcagcgaatacaaattgcggctgcaaggagatggcataaaagatcaagagccgaaagaggaagtatgcaaggcacgaggggcacaagtgagaccgtgggcaaagggaggggtgcacatagatactaaccttaagctgataaagcgatctgcctgaatagttcctttccgggtaaccaatatttcctaatggctctgagaccctgccaaacagaggcgattccgcaagctttctggacccagtgtcttccgagacagtcaagcgatggttggatttccgtgtcctgtcgaatatcccgatatccagtgggtagtttcgcctgtcgcaagtacaaaagcccgaagcgaatcctttttttttttttggtttcgaatgttggaggttcaactgacaccgcggagcaaacgggatctacagagatatcgcgcaaacgccgggcaagtaacactttcttcgtccccttagatccaaatcggagtggttcgaatataaaaaagaattggcgaaaattccggggttcccaaaagaattaaatattaagtcgagttataattccaataaacgtagcgaacgtggttctcgtagcggcaggtaagcgagcgtaagagcgaacgtggtgagcgaatgtgcgacttagcaagtcataataaatttcaaagggggatggaaagtgggatgcaaggaagatgggaccagaagggttaaaagcaacgattgaggattatacggaatattattattagcagtcagaacagagcagggtcgtccctaaactgtatagggccaacttgtggggggagggattttgtttttttattttttattttgatttgggttctttttattctttttattcttttattcttttgcggattagaggattcataattattattaataaaccgaaaattcaattagcagactaaaagactagtgggaaatcctagcgggggatgcacagagggtattgggtattattacctttgtatgtaggtacatctagatgtatacctacctacctatgtccttgtacatcttttcccgtcacacagtctagggttagaatctcgagtctcgaatactcgaaatatcagaaaacaagggcggagcatacacaaacgacatgaccagtgtgtcggaaaccactagaagccgacttgttatgctttccgagatgtccgaccaagtccgatccacctggttttcttaagataggactagggtgttcaccaacgatctgggacttgctccaaccttctatttgcagaaccttgaattgatcattcaacaggactatagcggtgcatcacgtcggggacggaagaattggaacgtggtgaggttcggaataaacaccaatctggcggcctgcgccactagcaaaagaaaaaaaagtggggagtcgtccagcatgtgggagaaaaaaatattttatatacagaagaggaaggacgttaccatctacatgaccggttaccttgtgtgtatgttgtatgttgtatgttgcatatgtgtatgtgctgtttcctgagcatagcctctttgttagtactgtaaccctagacatccatgtcgaggtcaggtcggtccaatcagggttggggtctataacaaggactctctccgaagccctcctctcttactatatccctgccaatcacgaagcttcaccggtaaccctgttagctccctacttcagcttcgggtacttttccattcgagccctttttatcttttagtcttttctttccaagcatctccttacgcccacccttgggccatgccgcaagtggaaaaagagacccttcctcttttctccagatgctccactcacgatctccccaacggaatagggtccgtcacgatcgtacggagtacatagtacatacatctcgtgtcgtcatgccgggcaatatgacaattcacatttcccgtttcctgacacgaggctgcatgtaagtatgatgtgtactcccttaccaaagtccccggataattcccgatcgtcttttccacctgatgcattttggtaaatgtcagaaatatagaaatagacagcataccaaggatatcggacggagtactccgtaaatcaggaaaggataaatatcggattacacttaccttggtcatccaagctcgggttttccaacacgagtctaagtttagcacaccttgcattttcaggtgactcggtggcctgactatgcaagggtcctgcccggtgattggttctctgatcttccccctagacccgatcgggctatcactcttggacatccgtgctcccctcgaggtaacgggaccgttccattatcagctgcttctgcactgtcaccttatccgggactcgtatatttagatcggcttcgtattgagatcggcttcgtattgaggatgtgatatgatgtcgatattctgcatgtacatgtactaggagtcgtgtacccaattcccattccaacggctcccggcccacgggctatctccaatgcgcaggagatcattagtgtttgaataattacccgatgcagcacgtcgaggtctgcagttccgtaggaacgtcaaccatgctattgttacagatgcgatgcagatgcagccgcggacgcagacgcagacacagatgttgaaaatagaataaatctccgtacgggtttcttgtttgtttcttgattctatttaatcctaggtggcctctatgagatcatagactgaagggctggatctgatatatcgacattattgacataagtttatttaggtgttgctgactccgacataaataaaagaacactaaccctaaccgggacataaacggtcggatgcacacctccgactattatttcgtgcagctccagccacccacgatgtaggaaagggataaaaaggggcagataaaaactatttgttttgaagcgcgttacctatcgataagatatgcactcgactccgcgattttgccacgttgaagacgtcccgaggtacgatgtactccgtactccgtgctcggtggacactacggagtacggagtatgcgattttatgtatccgattttatgaccaaatcaaggcatcactcaaaattcggtaatggggctcttgagaaatacaatacaccagtggagcgcgcaatgatcaccaatctgcccaagaagcttcaatcggatcagcgatcgcgtccaaaacagtcaacggcttcttcaggcatcttcggttaacagattagattattgtctgatgccttccttcttcccttgccattcgtcaccggatagttaataatcttccctacatgcaaactgtatcaatgtccatgttcgtgttcctcaactcccaaccaccccaaccaccccgaatcactatcaaacagagcaaggagcgcctcatccaagggaccaatctaatcaatcccaatcatccctttagaaattctaaaaaccaatggataatcttattagtttgtaacggaaacatttctccaattggcgtttgcactttaatcggccaatcttcggaaggaatatcagtctccacctcgaaacccaacccccccgaacacccgaaaaggaaaaaaacgcgaaaagcctgtacgaattaaacaccaatgcccaaaagcagagcttgtatcccgactgatcaatcccgtctcttggctagtgtgtcaagcaataatttggatcttccatgtccttggaaccttccaaagtaagaagcggatcaccatatccccagttcggacttgcaaccttgtttgaagccgccaatgctgtacgcgacaatcctattggcaggtacacgccccatccatatccatgatgatactattgaccgggtggatatccactactccgtacctagggcttcgggctctccggttcctgcttccatcttttattgtttattattctgcttattattctgcctattggcaaaccacggatgcctatcaaacgttaattggagactattacatactagattattccgcgcgaacgacatgctacccatatgctttagatcgacgtttaaccctaatcccttgtatactaccggttaaaagggttgaacgttacttcttacccacttaccctttctagggatccaacattgggaaatatgcaggtacagacgcactattgcctgcgcgtctacttcctatccgccaatattatgtacgtggtcgcgccactcgtgcctgtctgtgtatgtatgtgtgtgtgtgcctgtcttgcgtgtgggggggggcaccgagcacgggttgaggaagattattgaattattgggtaaggatcttcatcatcgatcccttcgagggagaagtccagggagaagtccagggagatgactatcaaccttgctgtatagtaggatagggattagtgtgcgggccacggggaagcataccctcggagtgaaacatcctcagagacactgacggctcggtctctctttgccctggttcaccacccttacattttatttcagctcctcctggttctgttcgtgaaggagacaaacggcaacgatcctcggtttttttaaccggtgtcttgatggggtggaagatcactggcctacccttgttcgcatcagagtttagtctgcaccacagctcggaggaatgtgacgtggacccgctttgtcttggggtggttcgactattcactcacatctctgtctgttctggagagaatatcggtgttggtatctttattctacgtgaagggagaagagaaaagacaaagaccggcttttggtgttaggcctactggagttggacgggaatcagctgtcacccggctatccgtgacgaatggcagatgaaaatcggcaaatcaccactcggcatcgactgcatgtctttggggactcttttctcttttttttttgcccctgcaacgaggaccttctcctacagggcagcctcttcgtcgatccccccatcgcagagagggaggtgtgaatccttgacatcagctccatatcgatggccactcatgagcggttatttctcagtgggaactgccgttcctagctttaaccttctttggcccctgtcggagaagaagtggcttccaggggagtacgcaatttgtacaaagtacgtacggaatgcccgacaaatgaatacacccgaacttaggtgttaatggggttcgaccccttcccctaggatacttagcgcctcacgactattcacggatgtcacagataaaaaggaggttaacggtttcaggaagggagctaaaagctgacagatgccgcttcggttagtgtacggctcggcagtattcgcccacactttcctctgttccccggtagcatctcaaaaatgagacagtggcggaacaagatgatcatagacttgcggtcaaaactgacagcaggaatcagcctcacctttgatattgatatttgtcacgctcccattttcaaagaagtgaaagagggctggctaacaggtatctctatcaccgatgctgcttcccgtagtatctgaatcgaacctattcatctcaagctcgcatgtctcagcgtggagagaataattagaagattggaagactgccaagcatgtcttactcggtttcggggactctttactatttgcaaaatgtctttagcatgaccaggaagtgtgtcacgctaacactgttgatctttacccactggcgtcgttattcgttgatttgtatgagaggagcctctgtccggggacgctagatttgacgcgagatcccgtgtcctttgagttttgcttattttttccatctcgtatcaagaacttgagtgcatccactcatattagacttattttagctctctaataacgtgtagcttcctaggcgctatagccgagtcaggggttgcgagacagatcaccatgacgatccagttcggattagaagcttgggcggaatgggatcggggagatgttgaatgtactccgtacgattatagcttattcgtatttgcgatattacatggatctgatgggtgggagatcgtagtacatcaaagctctgaactttattgtttttaagttatgaaaaatggctagtgtgaatgatggtaggactaaatatatatcggttgttatagagcaatatatagagtatatatcaccacaatgcaacagcagataacttccgattgcttcaccgcgccaaacgccatgataacaatcctcaccaaaacccaatcgaatcgtgattcgaaaccatctaagtcgaagtacggtttcaggttgatggaaccgacctaatctgtagcgtgaaacactttatttatacttcgacatacaagtttagcttgatgtttcaacccactttaagctaggaactaaaataaggaccttcagagtcgtttataacattgacgctataatatactccataactagcagtcggttctccggacatctaccacacggtagagatatatccatgaagtgggggggggcgtaaagaaagtcccaccaatcagagcacggagaatgaattttcaatcccgggatcactctcttcccgaggtccgaacttttttagcagcacttgtatccaattttggcagcgcattgcgtaccgaatcgagttcgttgcttcactaatagccccagtcaaccgctcctctttggtcaattggtagactctaccctggttccgacgtaagtaaagtgcacggtctatttatccatcgctttccactttttttccatgctacactgtccccacttgaccacgttgagtgcatatttagtccgtgaatgccaagataggcaacactctttagtgcaagaaccaaggtcggcttatcccattaaccttttgttaagcttaatctatattggtagcgaccttccatctatggtacatgatgtacgagtactacatcgtatatctctatcttggatatgccaatataaaagacctgttttcttacttcgctccactgacgtatctccaccgaattagatccacaaaggcgcaagagtgaaaacaagaatagcaactaacttcgtcgcaccaagcacatccatgattagtcaacataaacatatctgtggggaatggagagcttggcagccggaaggggcatagtccactagcaaagcgaccggaagaacgtcggaagaacgtcgaagcctaacccaacccgagtcgaaaaacgccctctaaaaaaaacaccccaagcccacccaaaccacagcaaaagacccttcggaacatacccgagtcggggggagttggagaccctgaaaagcggtccacgaggttgagctggagagcgttgcgctaaccttgccaagcccaaccacccatgcggggcggtatacataccgcttagggctgtctcactttttagttcgcacttatcatttggcatcgagcttagtgtcccccgtgtggtgtatggactccataatagatgctattattagcgagcgggaagattgttgtgttactactactccgtacaaccgactgaatttcccgttgactgcctgatgcagcatgcgggccgattgcgttttgagatcgtggacgtgaggtttgcatacggtatacagcatattgcttattgttggctgttcagctgttcgactagaacaacgccctgctagaagtaccggagggcttaggacccctcaaagcaattgtttggtttgtcgattagagttatcggtgaatattagggtttgatttcgatgcaacggtagtgttgcagtctgttgcccgatcggttgcaagtacgtcgatcgctgaggctgctagttcatggtacgattagggttatttttttagagtcatgccgtgcgtcggggtatgaccaaaaagacactgcattctgacggctaacgataataatagactcggcttctatgcggcaagctgaaatgagacacgatgatcacaaccgcacggggcagaacaaggtcggaacacagagcaatgacccacaaacttctagaaatagcagatctctaaacagctaagcagtatcgtacccactaaacaatccctctttggacgattcgcccgtaggaacagcaaaagaaaagcaaacgcggcgaggccgaaggaatcctctagaagatggaagcgctctcgtagacggtgcggtcgtagcagacggggaaaagcttagaccagaaagcgtacagctcgggtctgtcttcccgcacctcgaccagccatttggcgaatgcgaactcggtttggaagggattcggacttcgataaggagcgacctgatccatgttagcgcgggactagctaggtacctggagtcaagaccatggcgataactcacctctgaatatctctgcagcgcctgatgatacttctctgacagaccgagcttacgaagagtcggcatgcggattcccttcgccgcgatgctatatgcatggttgagattctcgcgttcgacaaatgagaactctccaatcacgacgcctcctggcagcttcttatgctgatgggcgtgagcaacttcgatcagacgggtgagcaagtcggcttcccagttctcgaaaagaggatggcggaattctttgatgtgtcgctggagcaaccacagttcacgcttcagacggactgtattggcttgcagttttgcgactcttcgttcgatgtgcttgttgagggtttgcagggcatagtgagtggcgtcgaaggactttattgactgttagtacattccataggatcgatgtttccccaatgcggcaatacctggaaagtatcctcgtcccatgaatcttctggggcacgatgggagtctgatatacggggcacatggccatttccgcgagaaacggagcgagagactcgtcgagtggagatgtgatccctcttggagttcatagctggggtggaatcggaaatgaatggaagaattgttatacaatgagcgaattcgagattcagttactcgatttgattataataagtgaggatgaaatataagagtggcgatggcatgctgaagatgagaataagtaacaaattgtgacgcggtgatgcgtgaagtggcccagggggaaggcacgaagaacactggtgattgctgcaaaatatctcaattgatatgtatcataggtgtatagacagccatttaggcatcatgaattcatgggaatcgtagcaataatatttcaaagcttactgcccgcagacttgccaaactcaatcaccagtttgccgaattgtgtgcccttcttcatatcttcgaacagctcgtcgattgcggacaagtcatctagctcggtctgcagaactcgcgacaccacaggtcggatcttcttagccttgacgaactcaatcatctccttgaactccttccgggagcccatcgtggtgccgcggacgtcgatattcttgaggacagcagtcatggtgaatggcatcttaggagacacagtcattccatagatagagaggacgccgccggccttaaaatgtgagtactttcatctgttattgaatgtatatcccgttgtcgcactcaccttgagtaacttgacagacttctcaatagaatcaccaccggcaccatcaatgatggcatcgaagtttctcttcccagctgggagcatacccaacatcttcttttcccagccatcttccttataactgacaccaccggtcgcacctagctcaacggccttttgaatcttctcctggctcgagctcgtcacaaagacatacgcacctctggcaacagcaaatcgtagcaccatcagagccacacctccaccaatgccagtaatcaagacagcagcaccattcccagagttcctctcaccagccttggtaatcagagctctccagcccgtcaagcccgtcaggggcagagccgcagcctcagcatcagagagatactcaggggcctcctcgacctccgagtactcgatggtaatatattcctgcaatgtccccttatccaaaaccttggtacctcccataattcggtacccagcaggatcctccgggccatcaggcgaatccttccagccagcaccgggattcaagatcacccgcttgccctgccattgctctgggctggggacattcgggccagtgccgacaacgataccaactccatctgcgagcagggggacatcgaaggtcaagccggggtagaggtgttggcggaggaagaggtcgcggtggttgagcgccgcggcagtcagtttcaccaatagctcacccccttgcggggaaggcttaggcaccgttcgtagggcgagcgggtagtagacttggcctggcttgccgggcttgccgtcaattggagatatgtaaattgctttggacattttggatgcgatggattgatgatatcaaaaataaactaataaactgaccttgactcaaatcggggcgctcatgcggggatgcttcaatgcttatcgatagccgaggtttctttgatttcttcgattacacgcctgggcccgaatgtccgagactatatgtcggacgattgatggaaattggaaacctgtatctatatactctgatagagttcagaacgcgaagctcgaattgaaacaaatcgtaatcaaaagcaacgagattcatagtgttttctcctgacgtcacagcgcttagggctatttttgtagctgctgtactatagcctttcacagtctttacattgtctttgtgtgctgcatatttcgctagtatatcaggagagctagtttagaatatttgagatctgctatccgttgttggttttgcatctcccgggaatatatattgtagctggcaccgaaatatcaagaatcattaatcatccccttctctatgcgatagtagaattcatgctatgtttgatgaagttattgactacataaatgagagggcttagaccttgactataaaacagagattacaataatgccaaaggaaatgtcagatttgaaatacaatatcaatttgtctatgagcgtctcaataaatcaaaaaccgtacgtcagtcacgagaagaacagtaggagataacctgggcctctgaggaaatgagagaaattccaacaaagctccatcaatggcaacagacaggaaaggagaaagcagcaagagaaaacatgaaaaaagtatgagtcgtccttctattgaaatcaaataaaaccaccgagccactgagctgagactgttcacttcctcccgcaaacccagccaagtccacactcgaatctcggacgacagcggtgataaaaagtacaatgtctctcgtccacatccctatcatggccaggcatggcctgaatagaggtctcagaagcagcgtcataatcataagtatagtacccagagttatcggcatggaacccatccacgtggaaacggccatagtgctgaacatcaggcctggaagacgtacgcttggatgaaggcactggctttgggggaggcgtcttgttgggaggagaagcagaccgtctgtaagtgtattttgggtctgatttgacatccaagctgtggcgggacttttcactcgaccggggaaagcgcgttggaggtggcgtcggtctcggcactggcgaaggcacaggcatataagctcggcaggattctgggtggctttcgcaataagatgctttgcgacagtggtgttgaactactggaccggagcgtggtgctgtggtgaatctctgagctgacatggcaggtctgttgggacggggtgcatgggcctcgcattggcatttctccacctgcggatgatgctctggttcacgtttggaggtgcggtggccgctgcggcgtcttctgggtggttcgtagtctgaaaaatcactgctgttcggagttgtgggacgtgtgtcgttggagcgacgctcgcgtcttgttgagtgacggttatcatatcgttttgtggctgattcggagctagaatagtcgctgctgcttggtgtgatcgggcttgtttcgtgcgagtgacgttcacaccgattgtcgcaggagcagggtatttcctccacctgcggaggggatccaacctcgcgtctgatagtatggcatcccccacagcatactacctccacctcataaatagaggagtcagtgttggccggggatggggagcgtgtcctgtgggagtgaatcgcgcatgtgctgctgcaggtgcaagatgccttttctggaatgggagatggcgatgggcatcgactgtgggcacaaggttccatctcaggtccgtaacgaactagcctgattcgcccgcttcgagaaagtctcttgtccattggctcgccagcgaagtaccagccgaattctgtattgttgggtttggatcggccagtgaatctggaccgtctcatcttcttcgatcaaagacgacgagcactgggatagtggagacacaaaagagaaaatgatctttgttatgcaaaaaagcttatagttcatagaaacctgactggattgtcttggggcgaaagaaccgtaaagagggaattgccggagagggggatgccatttttatagagctttgataacatctgtgaagctccaagactgagctcatcatatcatagacattcattatgtcgttttgcgccgtctctatgttactcctaaagtgagcaaatctcagacagcattgtctggtgcagaatgaagcatcaaaggacaaacgggaacagtagatgtctacaaagggcgacacaatgatctagccctattgacaggcacaacagaggatgatattttgaatccaaccggatgtcagcccgaatcgaaagacataagaccgttgaacctttgcaagccagtgtatgtttgcccagcattgcagaggttgggtagaaagggatagcattagatgcatttcaacctcctctattgcatttgtgggacaactagactcctttgtattcctagacaaagcaccaaaccaatccctaactgtcaactgtttgaaaaacagctgaactccaatcaaaagaggagcgtggcttttgtggagaacacacgtctattcttttgtttccacgtctctctgtttgcgtcaagccacctaactgtatacgtacttgctagctatagtctttttgggttagggaaaattagcaatcaggcttcaaattcaccctaattgtctgaaaacaccatcatcgtctcaaacgtctcttttctttaatacacaggattgggcacaatggtgtagaacaaggtagaagatacattgggcagagtatgcagacacaatgttgtgcgtgtatcggatacctgcgcttggcggtatgtaatgatagctctacaaatacgctagcctcaccactcttagacggcaaatcacgcgaccgctagtaatctaataccatgtatttacaacaaggcacaaatattgccacggccaccgcttaatcatttttgctctaggaaacttcccaagcgaaatcgaaactcggtctctctctttctcgaccttgttagtctggcgctcgcatctctgcattacctctctcacagctctctacatcttcgattgactagctcctagctgtcatattccaactctacaccaattttccaatctcgtgtcttgcaacctatccgttcgcatcacacattctcttgcaagcccgccacaggtttcgcgataactatctcagaatcggtttttacgtgggggatcaacatccgaccatacaagcctctttaccacaatgcctacaccacttccatctagtttcgcttcggccgctgccggcaacacccaggaccccagccggaggggggatggttcgactagcggagaatggtacgcagccactgttttgccttttcaaaaactgctccattagctgttgctcaccaggctcggttcaatatcattgcttgatgctgtgaccatcaatgttttgagctcaagatatccgatgctaaccttcaatgcctactaggtcccgaaaccgcatgaatggagctacgcagaccttccgccgtccttctgttgctactactccctctcaccaccgggatagtagccagcctgcatctgcctcgacacccacggccggcggcgcgtacatccccccacacctgagctcaaatacttctagcattgcacggaatggggacgcccgatactccaaggatcaacttctagagctgtataaatcgcagcgggaggaggggaccttgagtaagaacgtggaggaatacttcgtggccgactgggatccccacaccgtgtcagctcctgtgaatggagcatgggggaagcgggatgaccacaagaacaactccgcagggcccgaggtttgctgggatcacggtggccaggtggagcccctgggaatcacgggtatgacggaggatgagagagaggtttgtgttgtgccatgcgttcgggtctgagtgagtggtcttgctaaaaagaattccgaatagatgttcgccgcttcagtcaactctcctctgaagccacccccaacaaacgccgcgaaggaaaacgttatcccagggaccggaggtcgcaagtcttcgatctcctaccctcagggccatatcaataactacgccacctcctccccaaccgccggtcgcccgggtccccgacgccgagaaacgggagaatcaatcggcaaccctatgtctcctaccggttccagctcccgatttttccgcgatgaggccaatacctctacccctccgccggccctactgcgccgcaaaactgatttccgagaatcaaacccgaaggtggatgagaaggccaaggatagcagggacgaccctgcctctccctttagctctttgaaacgcagctccacaaatccaatcaatacgggcgttggtggaccgaactctccctggggttcggcctcgcataatgccaatttctctccgatgggtgcctttggagctttctctcttggttccggctctggctctggcactcccacgaccgaaaagaaacccggatacggaagtctccgtggagaaagcagattcaaggggttgctgtccaaggatagctccgaagatattgccggttccgctaaggaaaagcccatgggcaaccttgaacgtcttgctgaaaatgacagtgatgcgcgttcgcagtcgccctggggagatgctgtcaagactcgcgccaaccgaagcgaaactaatccgttcgacgagcctcgcagtggcagcgctgctcttggtgggtctcaggatgttgaaggtcctcctcagtctgatctcgggtttggcgcattcggcatgacctcgagcattcccggattccgggagttgatgcaaagccaggagaactcgcggaacccaactcccagcctactccagggccacgagccaaatagtccaactaacactaatccttaccagagcccgcatggtgatcgtcatggtgaacgccaggaacccgaagatgtcgacactgacggatcggatattcagcctgcccagcatcccggaattagcggacttcgggatcattccaacccattcggcgcgatgagacgggctggctcagggatcgatcttcctactgtggaccgcagccagaactccagtgtcaacgccaaccgcactttctctggtctcggtggtctcggtggtctgtctaccctaggcggagcgtcaacttggtcatctggggctgctgtcggcactcccactcgtgagcgttctgcatttgttggtggtttcggtgaccccatatttggctctatgggcgatctccagtcccctagcttgtcaaccctaggtggaggtggtctatttagccctcacgccggtatgactggcactggaagcatcggccgatcaagcaaactcggtgccctcttctcttccatgcaggacgagcaaggaaggcccggctctgtgggcctagatggactcgacccttcgcaaggcgacaaggcaggtcaagcaagccaccatggctcaacgcctacttcgcaaacacccgtctcggccgttggctctattccaaaccttgctggtcatgacattccttcgagtcaaactcctggcgcaggcattcctgcttctcagcagcgtaccatggttatgccggataggatgcgttggatctaccgggatccgcaaggcaatatccagggcccgtggactgggcttgagatgcatgattggttcaaggcgggcttcttcagccctgacttgcaaatcaagaagctcgaggacaccgaatttgagcccttagctcagctagtgagacgcattgggaactcacgcgaacctttccttgtgcctcagattggccttcctcatggcccggaaccgacagttgcccagtggactaataccaccgccggatctgctcagcctcccttcccgggtagtttcccaagcttcggcaccaccttgacagccgagcagcaaaatgcgctcgaacgacgcaagcaggaagaacagtacctgatggctcgacagaaggaacacttagctcaacagcaggccattatgaagcagatggctcctcctggtgctccctcatcctcgctgaacccttcgctgcagcaccagtctagcgcacatagcctccaaagccagcctagcttctcaagcatcacttcacccgttggctaccagccatccccgatccaagctcccatgcaacagcagtctcaaggtatccctggattcttcgatggtgttgcaccgaggcagggcggtttgaacgtgggacccggaatgctgggaacggatttcggcaaccaggatcagctccctgctctacttgatcgcctgaatatcagccgccaggatccatttgcctttggcagtgctggttcattctctggccgccagcccgataactttttgcagtcccagcaggttactcaaatgcttcaggatcgtgctcagcttcaacaagagcaagaggactttgacaaggctcatgaagatgatccatttgatcagcacgctcgcgaggagcgtcttcgtcagttccatgccttgcgggcccaggaaggcgagatgggcatgcgcaccgctgaaggcctgcctacccaccctgccgccgcatctcggcaactcgaagcagaggttgcggccgagatggaggaggcagctcaacagttgaccgactctgttaccggcgctgagcctctcactctttctcagcaagtccacaaggctgcttctgcccaacgccagcagcaggaacatgaacatagccatggccctcctgaatcggtctggggaaacaaggttgaccacgctatgccccaacctttccctcccccaccctccgcgtcgcctctccctgcacctaccgcccagcgtaaccgccaaaacgtcgccgagtctctggctaccgggtcccgctcccagactcaaactcccgttgacgctgcacctacctccatcgcaccatgggccaaggaggcaaatgacttgcccaagggcccctctctcaaggagatccaggaagccgaggctcgtactgccgcccaacgcgaggaagtcgccgctgcggcacgccgtgcccaattcctcgcagagcaagagcgtctcagccaagcgcaggcacaggcagctcctgggctcccttcgtctgccaactgggctagcgctggatctccggccacccctgcctcggctgggtctccttgggccaacaagacccaaccaacacccacggcaactaccgctaagaagactctcgctcagatccagaaggaggaggaggcccgcaagaaccgcgcggctgctgccgccgccgccgccnnnnnnnnnnnnnnnnnnnnnnnnnnnnnnnnnnnnnnnnnnnnnnnnnnnnnnnnnnnnnnnnnnnnnnnnnnnnnnnnnnnnnnnnnnnnnnnnnnnnnnnnnnnnnnnnnnnnnnnnnnnnnnnnnnnnnnnnnnnnnnnnnnnnnnnnnnnnnnnnnnnnnnnnnnnnnnnnnnnnnnnnnnnnnnnnnnnnnnnnnnnnnnnnnnnnnnnnnnnnnnnnnnnnnnnnnnnnnnnnnnnnnnnnnnnnnnnnnnnnnnnnnnnnnnnnnnnnnnnnnngagcggaccgtcggtgctagtggcaaggtcaagggtgtgccaactgcgccagctcttggaccccgcacggctagcggaaccgtcccaatctcacctctcatcgctaagccccgccctgttaccactacccgtacggtgacaagcggcggcaccccccagtccaaccccaaccaggccgttgaggagttcactaagtgggctactctggctctgagcaaggggttgaacagcagcatcaatggtgagtttcgtcctgccaatttataccgtctccatactaacatcttatctctagtcgacgatttcgtccagcaattgcttttcctacccgctgaggctgagatcatctccgactctgtctacgccaattcccagactctggacggccgtcgcttctcggaggaattcatccgccgccgcaagcttgccgataagggcattgtcgaccccgtctcacccagtgctttcggtgagcagaagaacggcggtggctggagcgaggttgccaagaagggctctgctgctaccattgcggctgctgctcagcgtgaggaggaggctgccagctctgcgttcaaggttgtcgctccccgcaagaagggcaagcggtaagggtgtgcattagcttttctgttcaagctgttttttgagcctagatagctgagtcggatctgttgtttctatttatgtgagatacgtgcccatgtttgttgcgtgtcttcgccgtgtctagcatcatactcctagtagcattgatatcggttctgagttgtgcatctttttcggacgtacgtacagagataccttgtagcaatatccggagttagatactgcgtgcttattcagcaccgttccggtcgtgggaggtggtcaagtcgacgtgacctaacatccattgtcttctaatcgagtcaaaacatacgtgtcatagtctgagtcgatgaaatatcactggtttatattattcgtttcatcttgtatgtttcattgctgttttgctcgcatgatcgtttagtgctgctttcaatggcaccattcagttcaccagacagagttgaggtttcagggaagcacttgaatggagttttcttcgccaatattaggctgttttgtatattctgtggcatttctcgagtccaaattactgttttcagtctttcaataaatatcccttcaaatgaacatttcaccacatcatgtgctagttgaaaagtaagacagctgcagtgctctcttttagaattatgcagcccatatagagaggtatggtaccatacattggatggtttctttgtgatttagaaataaaaatatatagtcattgtgcctgtaactggagatatagctcttgaagatgtcttataagcccgatgacctatctgtatagactcaatactggctttgataggagagacgacgacaaagccctgaaccatttcgaaaaactgaaaatagattgcatgacgttaaataggtgcggcaggaactggctcaatagtgtcaaatataaatcataacaagcatagctgagttccacccctttatacacacgaaattgtcataaacagatcataaataagttaaaaaaaacatgtccagtgcaatggtcgccatttcacgcctacatacaggatctcataagtaaggatatgattgctttagactgggctctgcagtgcgactcgcctttgattgaagggtcccaacagcctcttgattcccatccagggtgtgttgattggactatcgattccagtatacaagaataaatcgtagatccatcccccgaaggtgcagcctaatattggtgcaaccataggaatctgagaaagaaacacttgtaagccgagaaggcccggaaggttcaaagggttgacccaatgcccaaataaaacgtacccagaagtaatagccccccgcagcccatacttcgtgtccatacccaatcatataggatgtcagccgtggaccaaagtcccgtgccaggtttatggcatatccagtctcccatccaaagcacgcgccaatgccaaagataacgaagaatagtgccagaggtatcaggggcccggcgcctagattgccgtcgtctttcaaagcgaatatcatgaacatcaagaccgcgctagcaagaaactcggagaagaattggcccgtttttgtcataaattctgctggataggtgcaaaaaatgccgcctgttgctgtagtcgagtagccggggactgtgcgggtatttggcccgccctcgtagacgttgatggctgacttatagttgccgtacacgatggcagaaccgcacatcgcgccgaagatctgggacagtgcgtacacggggaatttgcgccaggggaacccgcggaggacacagtttgcaaatgtcacagcgggattgatgtggcctcctgatgccccgctagtgtatactccgagcatgacgccgagtctggtgaatggcgttggttagaagggagtattgagtgatgatagaagaagaagaggcttacccccatccccaagagatagattggtagtcacccttctggccatgactgagtagcacctgagcaacgaccccgtccccaaataaaattaggatcgttgtcccaaagaattcagagaatgcatcacggaagtactccctcactttgaaccagagcagggggcgagtataagggctttcgacttcgcggttgatgtgatggatagccgtttcgttcttgtcagtcagatacagcgagccacagccactgtcatgacttgcaggggggagagtttcacggcggtcttttgccattggattaaccttaagctctttccaggtagccatcgaaaggagagcccaagctctaaaagccagggttgggccttcgaattgatatagtacgaccaaccggggggaatctcaccagccacgcaaaaatgatatggtagtccccccagtatatcaacggcgtagaatcagggacgaccgtgtaaccaaccctttgccctcaatctatcccgtacttcatagaagatgatggctcgattggctgatgcagggtcttgtcctagaagagagtgtgtatctgtgctgtcttgtcctcttggttccggctccagagccccagagggcgtgcaagcttacaggaaagatatcagctgaagtcaaacccgggatcaagtgcacgtatgctttttattaaacttgctgggccggccattctcctttttgttacggtgtctttttatctcacctagagcagaaatttctgacagcgcattttcgctcatagttcattccagggaccgtttgtaggaaaagccgtctggcataggaagccggaagtcaccgtccgatccggttgggctgtttcctctcttttgggtaatcattggacaccgcaatgttgtatatagttcccacttaccggtatgtgtcactgtaataactgcaggaagaagcttctccgtcttctgctactcatcttcaactcttcaggtgccggaactcatgtaggcccaatcgcaagtttctagaaagtccaaattgtgtcacctcgaggagccagacttctccaaagggaggcgagggtaacggaaagagattggtctttccccatgatgatgctgagggttgtattttttgcaatcttttctcgtcggcagtgacacagttgacagttaaccgtgtgatcatatgcttagaggtagcatcgccgagaccgggttgtccggtgtgatagaagtgatatcttgccctccagctgttaacaccgcagtattaactgcggtaaaatgaagcaaatatagacttgcagataaaatttcagttctgaccagtttagcaatcgcaatttgggccatttaccgacagaattctggttgtccttcaaataagaccgagtcaatgcgcgattcccgccgatttggatctgacacttcgtcaaatgaaccgagtcgtcaatcgtctgctgatctctctccaaaatatgcaggaaagtcatgctgacagggctttgggggaattcgggacgagcgagccgtttcctggtaaaataacttttccctaatgagtccaaagtgcattgacttggctaatttcacaatcccagttccaatgagcccaagaaagagtctagacgaatggtcaatacatgttgtagcacagccaattctcacctttaatcccacgcctggccagggataatcccaccaatctattctcacggtgtctccctgcattcctcgaatcggcaccccgccgtgtgactgtgaagctagtatgtacaaacgcttatatttatgtgtttgatgtttcttgctatatctcgagttctcccacgctttgttctttgtcatctcgtgtcatgcgtaaatagacgactcctttttttattcctcgtagattcctacacaacactccataaccatgcagccctcagatatatttgtggggtcaatcgatcaaggcaccacgagcaccagatttttgatcttcaaccgtgagggtgagccagtaacatcacatcaagtcgagttcagccaaatctacccgaatccggggtaagttgtagtccaacccaacaatcggatcaaaagcccagcctggacgcaaattaaccactactagatggcatgaacacgacccattcgagatcataacttcagtagagacctgcatggaagaggcagtccacaagttcgaagcgcaaggtcacacccggagcagcatccaaggcatcggaataaccaaccagcgcgaaacaaccatagtctgggaccacgagactggcgagcctctgtacaatgccattgtatggacagatacacgctctcaggggattgtcgcggaattgaaacagaaaccaggggcagagcagctccaagcactctgtggtctgccgttatcaacctactcgtcggctacaaagctaatctggatgttgagacatgtcccaagggtgaaggatgcatttgaccgcggtaccttggcgtttggtactgtcgatgcctggctggtataccatttgaacggtggcgtggctgccaacgtctttgtctcagattcgacaaacgcttcacggaccatgtttatgaacctggagacgttacggtatgatgaagtgcttctggacttttttgggatcagggggaatgtttatttgcctaggattgtgccctcgtctgatgcgacagcgtacggggctgttgcttctggggctttggcgcgggttccgattatgggctgtctgggggatcagtctgcggcgttggttgggcagaaagggttctcacctggaatggcgaagaatacgtatggcactgggtgctttcttttgtacaatgttggtgacaagctggtgttctcgagacacgggttgctagctaccgtggcttaccactttggtggaaagcctgtatatgcgcttgagggcagcattgctgtcgctggatctgggatcaaatttttacagaataatttgaattttttccacgagtctaaagaggtcaatgaccttgcatactcggtggaagataatggcggatgtgtgtttgtcactgcgttcagtggacttttcgcaccttattggattgatgacgcgaaaggaaccatctgtgagtttctcattaccaggctgttatattatattaagtctgacagagtatgcagttggtatcacccagtacacccaaaagggccatatcgcacgcgctaccttagaggcaacttgcttccagactaaagcaattctagacgcaatggagaaagacagcggccatacactctccgaactggctgtagatgggggtatgagtaactcagacctagcaatgcaggtaaatagcaaattctcttgcacgtgtgagtatttgaacaagaactaatctgattaaaatatagactcaagcagatgtgatatccatccccgtctaccgcccaaagatgcgtgagactacagctctcggtgcagccattgcagccggccttgctgttggactttggcacaactttgccgagctgcgagatatcaatcgttccggcggtacggtctttgagtcccaggtcctgcgacaagagagttctgctaagtttgcacaatgggaaagggctgtgcaaatgagtagaggctgggtgggatctgagagagccgagaaaggagaagccgctggcctgaaaaacgaaacctacgcaccgatgaagaatcatgttctcccgcccaaggtagcacgaatctcagatagctccttaatctcacatgtggttaagagatctacatacactacgggtgtgaaagggagggcccatatctcggtcaaggagatcgacgtcccacctctacctgtgcagacggccctggggagtgtcttgggtgatttggatgatgcggacgaagaggatttgtttttggagctacggaaagtagagattttgcaaagactgaagaagctacggaagcgacagtcaaactgctactaattgtattcttattcctaatatggtcacgagtttattagatcacacatgaattaacataatgtacgaacaatatatacttcaacttgctacaaaatttcaaagcagaacatagattcggatctgagagatatcgcgctgtaattcaaagaatcaaccacagctcaagcaacacttgccttagcgatacgacactgtgcgcagcctattcaccctccttgaggaaaacgcaattcaactcggagccagggctaagtgtaacttcgaattgaagctctggattttcgactttattcttcccaccaaccggcagcgcaataatgcgctcataagcctgcaaaatccgaataacagtgtatcccatttcaatgatagcgaactgctgcccaatacaaatccgcggtcccccattaaacggaataaaatgccacggcctgggctgccagccggaaacccaccgttcaggaatccactccccgggattgaagtagttctccgatcccgggccgtcatatagatcagggtcccgctgcatcaacagcgtcgagtagatgacccgcgtgtttgcgcgcacacccacaggcgctagtccatccggcccaccgccacgtgggagcgtcgtatcgcgcagagagtggcgcacgttgaatggcacgacaggatataaacgcatggtctcgtgcagcactgcattgaggtacttcatttccttaagatcggtgtagctgggtttctgggcggtggcgccgacgccaagtctgtcgcgaatctcgttgcgcagcttggcgaccacttctgggttgcgcgaaagctcgaagagacaaaaggatagtgtgccggctgttgtatcacgacctgcgaggagaatggcgacgagttggtcacggaggacgcggggatcgcgggtgaacctggctagggcgtcgagaaaggtctcgtgggttgaaagtttttcattaagttcgtcggctgaatgagcgaggacggtttggatgtatggctggatgaactcgtccatgatcttgaggtttttgcggaattcggtgcgtgacatggcgaaactaaagactctgttttgagattcagtgttagattaagctcagcgaggctccaatgacagacgatggtggcgtcgcacaggatcgagtatcactcacccgaaacagaagtactccgcttgacgctgttgaacatatttgaacgcttccgcaaaccgtgttgccggattatctagactgtctgtgccgttgccgagcaggtagtctgttgctgcatcgagggtatatcggaagaagagtgacccgacgtccactaccttgctgctgctgggagagtcactaccgccgagaagtgggatgagtttctgaacatgtttctcgaagatttctgtgtcgacaatgcggtcacgcacaaacatgggacgaatgagctggcgggagcgagaccatagttccccgtctgtgataaagatgctgtcgccgaggaactccttccactcctgatggaaggactcacccttaccgtagtcagcgaactggcgggtgaggagtgccttgatattttctgggtccttggtgatgattgttcgggtggaaattccagcatcgagttcggccgtcttcacattttttaggccgcctgcttggctgatctttgcatcccagaattctataaggccgttgacttgattggcttggtagtcttggaacatgaagtcgagagcgtatgggagacggaactcaattttgggagctctgagaccgagacgggcgatttgtgctgaagcttggaatttgcggaatacgcagaatgcaacgaatagcccgagaagccatagcgaggcccgactgaatgtcgtcttctcaaggatgtcttcaatcatggtgccgctgaactggactgggctgagttgatgggtctgattttggtttgtgtcttcgaggggacacgttcagaataagagaaaaaagaactgatatgttgcataacatatgacagggacgaagtctattttatgaaggtgaacttgtcaaacagcgtggaccatacgggttgcaacgtttacgaatccgagaacacggccatcctctctttctagagaatataaatgaactcgtagtgtccaatgatgtatttttcctatatcccaaagaggtgtaggaggatggcccaaaggagcgatgcttgcgagccccgcgttatgtgacttcatgcttcgtttattgatccctattttgtctttgatattgccataagagaatgggctagacataaatccccaccaggtccattgtgatcccggttccatactgtataattatcgtagggacaccgacgaagatgccgtatgaagatacgactctcggtagacaagatttggcgacatagggagatcgacaacactttccaaggttgtggatatgtgggctgcagccacataaatatccctgcactgcataactaactatgttgtatgtgcacatgtccttcatgaaggcctaagtataagacgcctgatacgtcgggccttgagcattcgggctttaggctagagctatagaaagcctcgagacccctggctgtacaatatatatagaacatttggagtacggagtagttaagggaaaggagaccaatgatgtgcgtggttaaggggagctagtggacctattaagtcttcacgtgatctagtggattatcgctctttaactgttctctcacgggtacttgcctttagacaatttcccttctcggatgtcagttgaccgataagttctttgtctggatacttctcattgtgtatagaaaccatgaaacccattcacaacagctcaatggcttggtagtggaacaatggctattgtgaatatacaaactagtactagtgcatatgtagaactttagtacatagtcgcaaaatcaactccttatgtcttccgacagctcaaactttttcacctcttttatctgacccttcagataggattcaaaaataggagcaagggctcttctaactgataccaaatcgaccttgacggccctgtaggctgtggtacattgtactgccccacctcaccgctggccagccacagccacgtgatcaaacatccgttttggtcgcccgggtctttagcttcacttcaatctgcttgctaaagtcctgctttctctaccagaacctgttactggtctattaaactcacttgtgaccccaaccgctactacatcccgttttcatcgcatcttcattgttagtggcgccgataagatccgaaacgcctttatcgggtggcgcaagttcttttatcagcaaagctctctcttcgtgaatttctcaccaacctgtcacttttgcctaacttcacaatcgccttcgccatgatgcctcaaattgttctcgagacgcctcttgcgcaagcagtcgcaagcgtcatccagccgaaattggtggagatgggttggagtgatggccaagagtcaccactgatcgaatacatcgttctcatgctagtcaacggcaagaccgaggaacaaattgccactgaactttcaaaagatttccttggcctccaggaaggcgatactgcagccctcgagttttcgcaatggcttttcactcaagtcgagacgcttaaccaacaaattaatggggctgctccagcctcgaccgatgctaccatgggacagttgaacccctcggcaatggaattcgataactcagctcaaacgatgcccaatccgtttggagagaccaatggccaggatgccgagatgggcgaggccggaaacgagatgtgagtttttaccgtgcctttttgttaatgtttacaagatgctgacagtgctcctcaatagtcccacaggaccgaaagcgatgcgtaatggtagaggcggcaaaggaagaatgttgaaccaaatcaatcgaaacctggatcgtggctcggatgcagctctacatcgtgtgcgcggccaaggaaacgggcgcattggtcacaatggccggggtcaaatgagaggcgtcggccagcaaaatggtcgcggtggccgtgccatgggaatgccaggcggccccatgatgcagatgaccccggaaaaccagatgcagcttatgtcgatgttggaagaacaagcccggatgatgtctcaattcatgcctggcttcatgccacccgctgtaaaccctgcattccaaactggttcccacaatggctcccaaggtcgttcgctcttcaatcgggtcgaacgaggtggtcagcgtggaggaaagcgcagttacaacaagtcgagagcggcagacggagcagacgtggatatggacagcacagcgggtggtgaacaagatgaaagcaaccccgacaatgtttgtcgcttcaaccaacgatgctcgcgccaggattgcccgttcgcccatcaatcacctgccgctcccgaaggtacttcaatcgatccttctgatacttgctcattcggtgcagcttgcaagaacaagaaatgcaccggacgccacccttcaccagcagtgcgatctgctcaccaggcagaggccatgtgtcggttcttccctcactgcaccaacccaacttgtcacttcaagcacccgagtatgccagtctgccgcaatggagccgactgcaagaccgaaggatgcaagtttacacatgtcgagaccgcctgcaagttcaatccctgcctgaacccgaagtgcacctacaagcacgccgagggtcagcgcggtgcttacgctgacaaggtgtggactccgcgctctgcagagcatgtcagcgagcgcaagtttgttacggatttggatggaccgcaagagttgatcaagccggagaccgaggagaacactcagagtcaggagctgaccgcgtgactccgcctgacatgacacccaatgaatgaagaaaaatcactgttcaaaaaccgaaaccaaaaaaaaaaaatagcacacatcccacaacagtctgtttccgaagcgaagaataccatgtacaacccgatcttgatcaacgaacgaggaatggctggagcgaagggcgttgatactctttatgcatttgcttttgtttcagatactattttctgtcctgttcatagattccccctctaaaagaataataccgaagcgaagacaaattcgcgaatgtctcatgaaccattgtgcgagctcgtaggattgttggaaaaagtgagctggagggctcttggttagttagggctcccgaggtccccgcgtagcttaagtaagaacggaagcttccgaggaccttcgggtttagcttcaattatccaaccaactgcgaaccgaatcttgccccgatcagcagatatgcggctaccatgtgtctctagagcactaagaccaagaccaaggcaattgactcatctcctcaatggtcaaaaatgcacatactcagccgtcgtgcttggcggtggcatcacaggactcacagccgcctggcaactcgcgcaagaccccatatgcaaatcgatcaccttgttcgagaaaacagaccggcttggtggttggatcgattctgaaacagttcctgtcgatggtggcaatgtcgtgttcgagtatgggccgcggactttaaggagctcgctcccagggtcactccctctgctttacctggtgagtattgctcgcgtgtgcatgctccgaattgcagtgccttgatatgctgaccccactgaaaggcgacaaatctaggcttgtacaaagacctcattgttacccctaacacgagccccgcggcccagaatcgctatatttactacccggaccgtctcgttcgtatgccggcgccgaagcctgaactttcttttgcggagaacttcgacagctttgtgaatactatgatggagccgctatttaacaaatttctttcagggatagtgaaggatgtcttcactccaccccgccacccaactgaatgggcggaagatgagtctgttgcggacttcatcggacgtcgttttggccccaaagttgcagataatatagtctccgctgtgtaccatgggatttatgctggtgatatcgatcaattgagtgctcaaacactgttggggagcgtccgcaaccttgagggaggtattgggggcatcggtgggttagtttctggtggagttacggcctctctcatctccaggtcgctctccaaaacgaaaactcggaatatggaagactttatggctatagacgccatttctgcaggccctgaattagtgcgccgtcagcatgatttagaggtcctcgcagctggagctagtactttcacctttaagaggggagttggccagcttactgaagcactggtcgcttcattgaaagcatccggcaaagtccgcttccaaatgaacaaggaaatcacaggtttgcgtgcattggcacgtgctcctgcgattgcggtatgtgaattattctgccttgctatgctatacccctaagcccccaaagccctgaaactgatgctgactgtcaatagatggaattctggtcagacaggcacagccaagtcaagacctttgagtatgactatgtcatctccaccattcctccagttgcacttgcgaagaccatgcggaaaaccgagcagttagaagccaagctgtaccctgtcggcttgaccccattactgctacgaagacaggactatgctgtgaccgtattagtcgtcaatctgtattacccaaatcccaaccttctacccgtggaggatggctttggatacctcataccgcgttcgattccctacgaacagaacccagaatgtggacttggcgtcatcttcgcctcgtcctctagtgtagggaacgggacagatccttcatcatctgaagtcaaccaagattccgcacctggaacgaaaatcaccgtcatgctaggtggacattactgggatggcttcgaagagtatccagaccacgacaccgcagtgaaaatggctcgcgacatgctcaagagacacatgaatatcactgataccccgactgttacacggagccgtctccagaaggatgctattccccagtacacagtcggccatctggatcgcatgtataagctctcggacacagttcgtaaagattaccagaagcggcttattctcgctggaaattggtataatggcgtgagtgtgggcgactgtgtcaagcagggtatcttatctgccacctacggcatcggaagaaaccggctcaactacgagcccagtccatggcgtccgtggacttcgtttgattataaacgctggaaacttgagggtggcattgtgatgtctcctgtccgtcttgttgactccaaaatctgatgctttgtgactagtccaagtggctttgctacttatacttggaaatgtacaccagagaaggccaaagcgatgtatagtaaatgtatcaatgaaacaatatatttctcgttgagagttggaaatcgacggcattggccggatatcaaatgttcaatttctaatgtctaatcactgccagctcatggtcggttaacctaaggctaaaagttgatccatttgtgaagtctgttaccatcctcggtcctgatcctaaatcagggtcaagggcaagagcacccatactcccgatcgagggaatggcagagagatgtgacagcatccgaaatctcccacagacgaagcgatgggtgattggaaggctgaacccagttctaatgtcccctgccatataggtagcgattctcacccacctacttccaaccacttgccacaatgatgcaggatagtttggtggctcccggggtgcttgcaggaagccctggtgaatgatatgcacattgacatatactcgacacatggatatgaaatattgaatctgatcttaccccgcgtctcagggttcgaaaaggcattcaggcattcccattgctgtcaccaatcttcttgtcaccattggaatcaaagcccaatacatccagctgccggacaagttcttgaattttgatgactttctccaactgctcgggcaacagcgcctctcccagctgcttcttatcgcgaagatcccgcgcctggcgtagtttcttcttcagactgcgagctttcttctccttctcagcttcgagatcaatcggctcttcaacaggcttatcttctttaggtgcgggtgcggggacacgccagttgttcgactccgcgcccttgccctcagcggtgggcccggcttcgtcggtttccttcgcattccgcttggcctcgcggcgtttagcgttcttgttgctggcggcagtggtggcggcgactgccggtttcgctgcggtcctggtcttgtcgtcttcgctgctcaatgcttccgctcccggcaccccgccttttccgcgggttttccatgctgccgctgcccggtttttgtatagttcgacatcctcggggggcttgtagccggggcgcacgcggatctccttgcgtttagaaccgtcggcacggactgacgagggaatgtatcgttcgccggtctgggcatcggtggtgatgccggacctggcgacgttggaggccatggtgcggtttgtagggttgaactaatgaactagtaaaatatgagatgtccgatagcaccttgacagagtcaagctccaaggcaaagatcagtatccttgaagatccaaagagaaaaacaacgcgaacattgaaagttgagtgcggaaggccggaggctcggccaatcagcggaccggcaattcccgcagattcaaccttcgcaacttcaacctcacaacttcaactctcgctgcctcatactcctcttgaatcctttaatttaggtcgtgtgaaaacaccccaatctctcacaatggctggtgtatgtctatactccctcttccattgctcctatttgcattactacgtccagtactaattgacctctcgcatgacagttcgcaaacgttatctactcgcatgtctccctttcctaggtcctacgatcgcaactgaaacggtccaattgaaatctaaccgacgcattatttgctctgtttaggaccttcattcgcaagaacactgttctgctgaccactgcttttgccggtgccttcgcttttgagctgtgggttacatccaatcctcgagcatgttagatatgctgtacagcttaatacagaaaactaaccatgcaatgtcaaaacagtaccttcgacatcgcctccaacaaagtctgggacacctggaaccacggcgtatgtgaacctctttcccgatggaccgtctacaatacccgaggcgaggacccaagctgactatttctctcactttatagcgccaatggaaggacatcaagcaccgttatatggttaaggaggaggaagatgacgagtaaatggactcgaaggtgattgggtactttaccgcgggtaaaggggcatggaaaagccagtgaagctcgtgcctgttgtttctcatcccatatgtgggcttgtacgtgatagttggaaatctgtattttgactctcaatccctggttatacgtagaaaggccctctatggtttacacgttttatcgccttggtgtatcgtacatattagagtctacataccccatgctgttatttatcatccttgatggttataacaccaagaagaaagagatatataaatagatttcaaaagagatctaccaagacatctagaaagacattgaaatgttcttacatataacgttcctaggtaaggtcatcttcgaccaaatagatcagattgataaaagtttacatccttaagtacagaggccacagaagcagccaactgctctctcctttataccttcaagtcttcaaaccgtggcgtgtttttctgtacatatgtggtgataaggccgtagcgtggctgtggcgtttactgacggaccggttccatcgatgtcatagcgaaaaatgttaccttccggtctctacaaacaactctcaaattgatttcttcttgtatatttttggcctgttggaccttgagctttgtattcaaatttcaaacgcgtatatgacttcaccgtatctgtgctcatctgttcgcctgcattggtccacttcacccgttgctctcaccttccccccaccacaaagtatcatcgtgtgagcaacgtgaaccacacttgagaaccatatcgactcaatccggaccgatcccttgaatcctcacttgagaatttttttcccgcctgcatagccgcgaagaaaccacctgcgtcgcaccattaccacctcgagcgcattgtcgcgacaacggcgctctcccatcacttccttgtgatagcctgcgcgaccgctacggcaagcaagccacaacaacaaatcatgctcatgctcggggaatgtgagaagctgctcggtgatggtcttctccgtttacccaagaaacacaacttccgctatggccccgctgccgagaaggacctgctagagcttctcttccgatcgcttgtcggacacaacacagaactaatacaacacttgttcccagagggaactccggccggaccatggaaactagcggaggctcaaggtgcccgggaaggagctgagtacagtgaggcagcacggggcaagcgctgcggtcatatcttccgtgctggggaagccacataccgatgcgtgacatgtgccgcagatgatacgtgcgtgttgtgtagtcgatgcttcgattcctcggatcacactgggcatcaatatcagatttcgctttcctccggaaactgtggctgctgtgattgtggtgatgacgaagcatggcgccttccgctattttgcgccattcataccgatagtggtaataccaagggaaaggaacgggcgcagcgggcattgccttcggagcttgtcgcttcaattcgcttgactatatcccgtgtgctcgactacttctgtgatgttatctcttgctccccggagcaattgcggctgccaaagactgtcgagggcattaggcaggatgaggaggcctctagattgcgtccggactggtatggcgctggtgatgaagaggaggaagaacctgaatttgcggtcatgctgtggaatgacgagaagcatacaattcgcgatgtctctcaccaggtcacacgtgcttgccgtgaacgagatagcttcggccttgcacgggctcatgaaacgaacgatatgggccgcagtgtcataaagtattcgagggacctaaacagactcttaggggtttctaagataatcgaggagatcaaggttaccgtcacggtgcgctctgcgcgggatacttttcgcgagcaaatgtgcacaacaatagtcgagtggttggctgatattgctggctgcgaaatcctcgaggacaatgagattttcagacaaaccatctgcgaggaaatgcttatgccttggaaaaagggcagtgggggatataacgaagatatcggcatgaagggcattgacgatcatcagcggactgagaaccttccaggtcgcacgctgatgattaatttgcctaatcatggccaggtcctcttgaccgccgacgaagacgaagacgaagacgaagacgatatgcttgatgacgatgctatagacgaagatgaagacgaagactatgtcgaggcccacgatgctgatgatgaagatgacgacgagatggacatcgaactttctcgtgatcgggaagaagatgaagatatgatcttagcaggtgcagatgaggaacttgctctagcagagcgcattctcgccggactcactggcacccagccatcaccccgaccagcactgaatcaaaccgcagatcggtcctctaccgaacgaggcccgtccgcatctcaaagtcctggccctgaatccgcccctacaggttatatccccattcccaagactcctggttcgtaccgacaaaggccttcgaacacggatagtcactggcaagtccggccgcccattcccgccccgggcgaggaagtacctccgtatgaagacttgtggcagcgtactcgcctagactggctggtgctgtatgacttgaggctgtggaagaagacacgaacagacttgcgtgatctctacatcagcactgttgtcaatgttcctcagttcaagcgcattatgggtcttcgtttgtctgcgttgtacacggctctggctcaactgtacctcatcgcggatcgagaaccggaccactcgattgtcaacctttcattgcaacttctcacgaccccgtccatcactgaagaaattgtcgtgcgaggcaacttcctcacgaaggtgatgtctattctctacaccttcttaaccacgagacaagttggcgaaccacaatccgtcgaccccaacgccaccctggcgtttgatgccggctcagttacaaatagacgtctctaccacttcttccttgacctgcgataccttctccaatctgaatacgtacagcatcgtgtgcggaccgaggaacaataccttcctcaattccttgaccttgtcaagctgtcacagggtatttgccccaatgtccgcgctgttggtgaacacgttgaatatgaaacggatgcttggatcagtgcgtcaattctcatgcgggaaatcaaccgactttgccgccaattctgcgagtctttccgcgaccctgaaattgacaacgatgacaaccttctgagggcaattgagaccaccgccactacagcgattatccattcggctggtgtagaacgcaagcggttcgaccaggcagaaataaaagatgaattaagattcaagctactgccaccttttgactttgaggtcggcacctctggtcaagtgccctgccatcgggtggttgaattcgtggtggaacgtggatctatcagtttccaccatgccctccactacacattgtcgtggcttattgaatgcggacgagatataagtagcgagactatgcgtggcgtgctctttgacgctgccaatgcggcgaggagtgagattcatgccgctcggactgctaaccctagtagtatcgatgatatcttgcttgcccttgggcccgaggacttgctcctggctatgtttgactatccacttcgagtttgcgcttggctggcgcagatgaaggctggcatgtgggttcgaaatggtctcagtcttcggcatcagatgtcgcagtaccgtggagtctcttctcgtgattttgcatactacagagatatcttccttctccagactgccttagtcacatgtgattctagcagagttcttgcttctatagcacaccgctttggtatggttgagtggatggctcgaaattacatgccccgtcctggatacgaagatacccagattgtggacgtggcagaggaatttgttcatctactggtgattctcctgacggaccgaacatctctgactgccatcgatgacagcattcatctcacccacgaaaacatcaaacgtgacatcgctcatgttttatgcttcaagccgctgtctttctctgacctctcgacccgccttagtgacaagcttctggactcagacatgttccaagatgtgttggaagacgtcgccaacttccgcccgcccgagggcttaagcgactctggtacttttgaattgaaggccgaatatctcgatcttattgatccatatagcgcacactatacaaagaaccaaagagacgaagcagagaatatctacaaggaatggatggcgaaaaagacaggaaagaatgcatctgacattgttttcgagccaaaacttcgacccatcagctctggcgtgttcttagatcttcctcgattcgccggaacaatgctgtttgcacagattgttcatcaatgtttggaatacgttatctctgcaaaagagtgtacaccaaccatcccatcgacgcgcgttgagacattccttcaagtgattctgcatcttgtccttgcagcagtattggaggatgattccgaggaaactgatatggtagaagaccattccaactcattcaactggaatgctttgtcaaagacccgagagatcaaggctggccacttgaccattgtcggtttattggaaagaatttccgtcacgagtgaattcactgcatctggccctaaaatccgacacatactcaaacgtctgtggcaaaagcgccctcgcacatattcatcggcaactgcgtccctcaaatttcccttcgaccggattgacaccaattctcctgcaattgatgcagataacgacaaggagaccaagaagaagcaagcgctagagaggcaagccaaggtgatggcgcagttccagcagcaacagcaacaattcttgaatagtcagggtaacatagattggggcgaagaagatttcagcgatctcgagtccgatgcagacgcaaccccagaaaagaagctatggaaataccctagcggaacatgtatcttgtgccaggaagagaccagcgattcgaggctctacggtacatttgccttggttcaagatagcacgattttgcgacagaccgatatcagggactctgatagaattcgcgaggtgctcagaacaccaacaagtttggacaggtctgctgaagaagtgcgaccattcggtgtatccggagagaaccatactaccatcaggcgtcttgactcttctggtggtgaagtcattagtgaaaagattggactgagtaaagggttcaacgcgaagagcactattcgtgggcctgtgactactggctgtgggcatataatgcattactcctgttttgagcagtacttcttggcgacacagcggcgacacacccagcaaattgcgcgtcatcatcccgagcacactaatctcaaggaatttgtttgtcctctttgcaaagctcttggaaatgcattcctcccaatcacctggaagggcaaagaagagtctccccttgttccgttcagtccgtccgaatcattcgaccagtggattcaattaggcctcaagcatgccttgaaccaacagcaaaacctcacaatcctcatgcagaaggagaagatttatcctcaaccgtatactgacatctttatcgactacttgtctaagaccctggttcctccgcttgccaataatattgatcaactgagggcttcgtatttcccagcaactgcctctgcacaatacgtcacgccagcacgcatgccaatgccaggtgttttccctcccaccgaagacctctccccttccagcccacttcagcaggtgtcgagtccctcggacagccctatttcggaactgcttcagagctacaggcggcttaagaagacactcacaacaaaccatgtcaattcgatgttcaacaacactcctgaggcgaataacaatgacgatcttgtacatactgattctctaattcggagctttggtttcagcattgctgcagtcgagatcgcgcagcgtggtgtcgagtcagagcccggctcgaccttgctggacacaattccttcgctgacgcttacccatctgcgcgttctctccgagacagtgttgacgtatgctgccgttgggtgtcttaactcgtcgggaccatcaaaaagccatccaacaaatgaattccaggagatgcatcgccaaaagatttgccagctacttgtcgggcacccttgtttgaatggcacagctttgcttaatgatgtccgtaacatcgagcctctgctagctgtggacaccttcgtgttcttcgcagagtcatccttgtctctgctcccagtcctcgatattgatatcagacatcttgtgcgaatgtgcttcgtggctgagattgtgaaggtcgccgtcactttcattctttggccactgggattaaaggaggaactcgccacccaccccgaggacaatactatggctgctggtatatcggaagaacaattcagagtgaccaagcagttcttcgactcggtcgttactgaactgaaggcgaactctgtcggccgtgctgaaggctcatccttccccgctgagagtggctacgtcaaagatggagaggaaactgccaccccaggcatcattacggccgtccggcgacttgtgacgagctacggactagcattcctgcgcaaggcagttattcttcttcatgttcagcatggtgtcgagtttcccaacacaggtttcgccgacgtggagtcctctgagcttgagcgcctggccaaagcactccaactgccttcccttgatgagattctcatgtctgtcaagcccgcacgcaatacaaacagccccttcgatgcagtcatctcaggatggatcttccactggaacgcttcgcgctcaggcattcgcttcgaagaccaccgtctctggcccagtctgtcgcaccctgctatcttcgagcttgttggccttcctaagtacttcgatagcctaatcgaagaggcaaatcgtcgtcggtgccccaattctaagaaggagctcactgatcctagtatctgtttattctgcggagaaatattttgctcacaggcagtctgctgcatggtgaacaagcttggcggctgcaaccaacatcttcaaaagtaatcatacccgtcccactttgtttgtgagtactttccagctaaccagtcttccacaatagatgcggcaaaaacgttggtctttttatcaatattcgcaaatgcacggttctctacttgcacaacacgaacggatcctggcattacgcgccctacctcgaccgccacggcgaggttgaccccggtctccgccataaccgccagcttatcctcaaccagaagcgatacgaccggctactacgcgatgtatggctgtcacactcgattcctgcgactatcagccgcaagctagagtccgagattaacaccggaggctgggagactatttaatgagcataaaaatggggttttttctgcgattgctgatatgcgtgcgtttagattccttacctgcttacttttgatgttcgatggcgaatttgaaacgacggtgattgtgtgtttaaccgatttcttttcttttcttttctttttcactgtatatctgaaattcttctcatcaataggttcccttggtagttatgatttaaaaaataccaggctatgttcaactcaaatttcggttggatttgaatatagtaataccggttccatcgacacaggtaaaaaggtcgttgttttgctgcatatattccctgttataccccttctaatgagtcctcgacactcgcatttcctttctcgcttccccctcccccccgtaaatgactcctacgcatagcttctagttgagggagatgacgtttcttagatatatatatgtctattttgtctttcttctgcataaatatgtgtgcataattggctgtgagaatatattgatgcacaacaggctttctaactatatcctggatgcctgtcatcatcaatctagctcacttgtcgtataggattctaaatgtctaaatcaggattgactaactgagcgaatgccatcgctgctcctagaggactccgactagtgacatttagcagcgccatattgctcagcacgtttctttgaagggactagttgtgacaatgcttccaagactgacagtgcgccaaacgaggccaaacgcccgcccatattcacacatagttggcagtgtcacttagcagggaaatactatgaagtaaaaatacttacctaaattacctgcataactaatgaaaatgccctgagaacctcggaaagcttgaaaggttggccgatagtcttatcagtgccaagccggatctccacctcttaacatgagcctttctcaacttcattgcaacttgagctcgagaaacatgaataacgagcagtttcgccggctactagccgaccagtcatcatcaaaacctaaaccccagagcccaacgcctggtcgtgatgcatcgcgtggcggcgcaaccccgggcgggtcactggggtcgcgaatgcggtccagcattcccatgaccccgtatgtcgtttactttacagattgctatgattgcggaggaagctaacagctggaaatactacaggcgttcagtcactggtgtggactttgcccgtcagctcttcgaccaacgccgcgagggcgaccgaccttctaaacggttcaagtcctccgccgcgccgaagggtacctcgctaccgaccggatatcaggatcgtgcgaaattgcgcaatgcagaggacgaaggtcagagcaacacgggtctggaggcgcgcatcaaggcactagagaatatggttaagttgggacaaatcgaccaggctaccttcgacaaactacgtcgagaccttggagtcggaggtgacattgaaagcacacacatggtcaaaggactggatatggatttattgaaaaggatcagagctggcgaggacgtgtcacaagcggccgagaaacctgcgccgcctcccgaaaaagaagacgtagatgaggaactcgatcgtttgatggaagagcagggagctgaggagcttgctgctgcacccaagcaacagaaagaaaagaagaagggaattatggcaccaccaccagctaggcccaagacccgcgatgaaatcctacgggaaatgaaagcaagccgtgctgctgctgccacgcctcccccgccaccggagtccatactcggctcgaaattcaagaaactgggcgatagaaagcccgagaagaagcgctttgtggagcatgatgagaccggccgtcgacgcgaagtgcttctcatcaccgatgcgcaaggaaacaccaagaggaagactaggtggcttgataagccgaccgaagtgcctgtacctactgagggggagctcatgatgcccgataaaagtctcaaacctctcggcatggaaattccagctgatattgccgcccgtgccgctgcacaagtcacacccgaggatgaggacgacgacatttttgccggtgtcggtgatgattacaatcctctcgctggactcgaagacgattcatcgtctgatgaagacgatgaagtggcagattcggctactcgcaaacccgaaaagggttctgtgggtgaagaggagaaggaacctgccgcgtctaaaacagcacttgcaaagcccaagaattactttgcgactgggacttcgactacagcagaagaggagcctatcgaccgttccaaccccctcaccaaagatccaaccattcttgcagccctcagacgagctgcagccctccggcagagctctccctcggcagagggcgaagcagacgagtctgatacagcgcttcgtcacaagcgtttcattgaagaggcacaccgccgagacgctatggatgctgcagatatggatatgggattcggaggaagccgcaacgaagacggagcggaggaggacgatggtcccctgctcgactttgacgacgacgagcgaggcgggaaaaagagaaagcgtggccccaagaagaagaagggcgacaaagatagcgtcatagatgttatgcgtgttgtcgagagtcgcaagaaggaggcttcatgagtgtcattgctgcggatgccaggacatgggctctcccttgtctcctacatgtactttatactatgaaatcgacatttgaagctatttgataccctgctatgccatgccttttttacttagatactagaagtcatcttatcatgaaggccactcagtcacctccggcgtttacaaatcgttgtattaacccctttctaaacgctgttggatatcatccttagatgcaatcaaggcgatattcactctacatatctatataaaagtggtcagctgcttatctggccttagccttcaacgacgtaggttggtagggatggcattgggtagagacagtagagacatcttgctaacaaaatacctcgatgtcttttccagtacatatctcgttctgaaatattgtctataatggtcccgtgaaaacctgcgtcactatgtaataagtactgcgtgtatgggttaacgtattccgtcgatatcttcggcatcggacgtgtgccagccaccactaggttaatgcgtctatatgatctgggatttcggcttcgtcgtgtctcgcttgcccacaggacaagatagaatcagttctcccattgggagatacttgatcctttagactaagtcttggaattcgtcgtcacatcttcccaaacaggtcacctggggcatgttaacagggtggtgctttccctatttgagaatcctactttccctaaaacagaaggaccccagcttcagtccccagtttctgggtataaataccctcccctcccccccatctctcccatttttttcttttctcctacatccatcttccatccatcttctactccccccctggggtttggacgtttgttcatcactcaacttcataaccatcttttcaccatcactctcttttcttctgcgtctctgccacatcttgctgacccccagatgtctcgccacctggaccatgttgactggtgagttcctccttattatttgttccttcttatttgttccttccacatgttccttccacttgtatggcttgtcatacccgaggggtttcgcgtctcgcgttgtttatttctcttccctctttcccttttttatccatctctaccactccgtgatttcgtgtcatcggcttgtgtggttcaatgacttcatagaatcttggcatcatgtatgcctcctaaataactcatcatttatctaatatcgactctgattgatgtgttatttctgctcatgggacgaacgacctcacggtaatcatgcttcaggtgagaactccagcgttatatcaaccccacggttctttgctcgcaatgagtggaagacctcaccagtccattggctgacgcagggaaacttcttcttcctctgcctttatagattactgcatttttcgccgcctttgccgtatccagtttgcccacagcctatgacacaccatcgcggtcaacaccaaatataaaggccaatcttccatccgcaaactctacatccaggtgaggtctcctagcggacacaaatggaaaggaggttgaacgcacccgcaccagcctccgtagatagttagatgagattctgcgatgggatctcaccagcatttgctgacgcttgttggttttttaccaggcacctctatatccacagttaagttacgaaaatcgctatcagagctacttgatccttccgagcgtctcgatctcagctgtcgcccagcccagcaatgtctgccaattttagcgcggacaagtgaatctccagcgcggtatactccacactgcatattcaggtgaggttcctaagcggacaaaaagggaaaggaggttgagcacagacaccaaaggcaacctccatagatagttagatagggttctgcgatgggatctcaccagcatttgctgacgcttgttagtgtctcaccaggtacctcgatatcatcagcaaactcgaaaaagcctgccagcccacttcaacttcctgcatagagctggttcgtcttttatccaatcgactgggcgactcccaaatatgagcatgagtccactctaggttgttcccacgttgcctatctcatcatgcaacaagcatgcacatgatatttgctccaatgtgcattttgaggtgaggtctcccagcggatacaaatggaaatgagattgaatgcaaaacgccaacctccaaagatagttagattgagttcagcgatgggatctcaccagctttgctaacgcttgttcgacaggaatattaccagcccagatatgcaagacctgccaactcatttcagactgctatcgcgcgctgcgtcgctcgtaattgagcaaacacgcaaaaatattcgctttgatctgcgttttcaggtgagatctcccagcagacacaaacggaaaggaggttgaatgcaaccgcaccggcctccatagatagtcagatagagttctgcgatgggatctcaccagcatttgctgacgcttgttagtcttaactaggcatccccatatccgcgtcattcattcgggcttacttgcgactcaatgctcttcatcgatatttaggtaaggtccctgagcggaaaacatatggaaaggaggttgaatacaaacgggcaacctccaaaaccaaccttcttaattagctagaaagcgttttgcgatgatgggccttaccagcttttgctgatgcttgttggttttaaggtccataacttgaacttgcttaccactcggcggcctgtcaacacgacaatctgatttatcttgatcaagtaagattataaactgcaccttcgaagtcgtacagttggctgactactaccatatctgtttttgattgactcttccaactcattcggtgctcgaccagacaaaagcgttgagtctttccggctttatacgtgtcgtgctgctgggctacaatgctctagtggcgaatatttcttattattatttcaactagacgaagaccacagccagcatcgggaaaaagcaatagcagcagtgtctccattgcaatatacacggctaacatcactcagatcaggctttcagtcggctattcatctgagcaatgtcaatacagggcgacaaggtaatttgaaaccccctataggtcaacgagcgaattgtggaatatggtgaatggcctactggcaacattaaagttacaaaagtggagattcaatgtgaataaatcgatattgaacatcatacaacaaattgacttgaccttcaagaactaaacctgtaccaaaaaaggcagttagagatactcctattgacggcagatttgaggaagagagaaagtagcaatccactctgtagtccacggatttcaagtgaacaacaaaaagcaacatagagccgctatgggtgatctcgcacacgctctcagccatagggataaatgatttcactttcaggagattctcgctgccttcattcgtcttatttcagtcaacttcatatttacctaggtatctgggcattggattgctgttttcataactccagtttttattttctccccttatcccgacaacattatcagatcaacaccaattaatgcccctttcccacctgtgaacatcctcagcgaaaagcatggtaccgtggagtaagaagaaagaagaccaacgtgatagttagaccaatgaaataggcactccagcagattgcattcccgtcaaataccaggtatcgtataaccgactagctcacgaacaggacaacactttattctatatccccacatatatagaaaggctctccgtcgagagaatggatggagcttataacaccaccagcagtattgccaacgagcattctgcagttgacgaaccaaacgtaattccgaaactggttcacgccataggagctcagtaacccctgttttacgcactcgaagaaatgactggtaacacgtcaagagatatctgcaagttatcgcgaggcaaacttggtccgtgacccagaggaatgtaaagaggatttccactatttctggtggaatcctttggaaattgtcgactagtgggggtttctgctgggtcttctgttgatgggtggttcgtcgatgtcgttggaatatggatctcatctttgtgagtgggcgtgtatgattgtgcatattggaatatagcgaaatggtgagtgaaatggaaaatgaaattgacttcggtctcttttacgttgataggcgtcatcaactggaatagtacccatgggtttctaccagcttagggctatagtgctgttcatcctccttctcatttctctctattttcttttctgttactttctgactgctgaaacaatggatttagccgtcgttcagcactactttgcctttattagcatcacagtttcgactagagcctacgaatgatggcactatgcaaataaggtaagccaaccagtatctaggattagctgatccccaacggattgaccttagaaacgcttcaaaggcaaaccccacgaaagacaaatgtcaagatgcaaagttcaagcctctttgtctcaaacgaggccttaagggtgcacttgtgatgttaccaagggcaaatactgaagaatatgagacatctcatccatttgatatcaaaattccctttcttcgctcctctttcatcaccaccgaaaatcatttttgatcaaaaataagaattgcagagcatgaccagccatcaattgccgttgtttttgatcaaatattgagaatacttacttgctaagaggaaatttcacgtgggtttgatgttgaagcattgaatattctccctagtgtggtgtatctcagcgatggccaagagagatataaattctcacgtagttgacacaaggttgtgggtcctggtccgtgcgcatcccgacgtcccaacctgacttccgatctcgggacttccgacttatccagagaccattttggcgactgaatcgagcgaacatttgttctcatgctgataacacatccgtggagatacaggggaatcatgacggagaccgcgggtttatcaagacatcagcctcgcaaaccacgtccagaagagcggcaaaagcggccgcaattgacacatttcctgtgtctccctctggtaaacaccaagtcgctgctgcagctggaatcatcgctcggggccttcataacagcccatgtcgatgaatctgggccagcttctcaatcgtcccccaagggccaaagggatacatcgcgcctgagtcttccaaggacagcttttcgtccactgggcacacttcaccttactcttggtgtgatgagtctcgccaataaagagagacttgatcaagctcttgcttttttcaaatccctcgacctggcagacctaatgagcgaagtgacgcgagccgccgctcactcacaacataaagacgcccttcaccaatcatcgcccttgacggtttccctcgagtcattacatgctttgcctcaaggaaaatcagcaaccgtattgcatgcttctccagtagatcatacaggccgtttgcttccattttgcgtaaagctacgtgacaaattcatcgaggctggcttcatccaaagtgagcccgacagaagatcggcaggaagacataaccccaccaatcgctccgtccaagacagccctcaggcctctgggtcagctaccttctctagtgacgtatctttacgccagccagaaagccaaacttcctctggtcccgcagacgtgtgcgaaagccggaacccattcataaatgtaataacacgaaaaccgaaacagcgaccacttcttctgcacgcgactcttgtcaataccatttatgtccgcggccagcagggtcagaacaagggtgcgaaaggaaaccgtccacccaaatgccttacatttgatgcccgcaacctgatctcacaatatcgtaattactaccctgatgacaatccaaatatcccacaaccagcacgtactggatcttccgaagacaaaagtgacccctaccgtacgaaatcttcaccaatccccgacagaaacatcgtttcctccgagcataaaagccattcggccacttctcccccactgtcgcggggctctcctttcatttgggcaaaggaaattcctctggttactatctgcatctgtgaaatgggcgctaggaaattacatcctggtgtcaacgaccgccatggtttgaatgaacgcctcggcgagaaatatacggtcgttgcagaacggaatctgaatttatgactgtcatcgccacccacataacatccttaaacattatcaattgggaatcatccttgtcaatagaaatcttgtctaagacctatatgtggaaagtaaaaaaaccaaattgtttaagctatttgttttccttctgtatcgctagtaatattaatgagtagactagatagatcccaagcctgcttgggttgcagatagtacatgtggttggggttgctcatcataaagtgagctggtccgagtgcagctcgacgtcggctaagcaacggggagaggctctatgacatcttcttggggcagtctgcaaagatccgacgggacattgaaagccagacagctagtacaacaaccctactcagccgagcgcggtgaattgcatatcgggctgggatgaaacgagaatatgagtgcagttgaaaatctacacggtcaagtacgaacaaatcatctcaaccgactcatgatggtctcctgtccccgttcaacagacaactccgcggctttagctttgatggcagtgagcatgctgcgctcgaaatcatcacgggtacgcagcacagcctcaacccatgaaagctgcaggtcccagtactcaagcttgaatgcttcataaacctccacgagcgcggggcccttttcagtggcaaggaggcgaacaagccaatcaactagccgccacttctgcttgatagtaccctcaaatgagtcggggtagttctcaaagaacgcgaatacagtgagaacgtcgtccttgaacttgtctgtgaaggggtcgatgtggcggcggaatttaacacccttgttccgcaccgcagagaggtagcgcaccagcagctcgtccgagagttcctcgaccaggatctcggccaaagatgggtgcagcacggaggcgtagtccgccatgtagtcttcgaaggtggaagtgatacgcttcatggcaaattcgccgtaccagcgggacgtgaagaagtctggcaggacagtgtccagatcgacccagaagatcaggctcacgaactgcgccaggcagtgcgtgctcagatcaacatagccatcgcgcagtgcatccagctcgatggtcgctgttgtgcccatgtacttgggtgtgaccatgggctcgaaatcggacttgaaccgcgtcaggtagccgaactggttgtcctcctcgttgtcgtcgatgcaggagatttgatcgttggctattccgatcagccagtcttgcaacagctgcacgccttcttggtctgcgccttctacttggtgcttcgcacattcctcgtccacgagtgcctgccatgcaatttgtcgggccttcaaggcccggaacatggcatcaatgataccttctaccaggtctgcgcggtccgatgctcctgatgccataacttgttcgtggagcatgcgccacatgtcggccagtgtcttggtgcggaagtgaccttctgcgttgttgtctagggcatctgaggcacgctctaccagagactttttgtccgcgttgaaaatgcggtccatccattcttcgacggcattgatgatgacggcctgccactttcggactagttctggctcgcggtcgtcgagaatgttgggttggagatctgttggtgtccagcccagcttcttcattttcttgtagtacttgtcgctccagtggatgatactgagtaaattatcagccgggagctcggggtcgtcgatcatgctaagcaagaagtcatgcatcatctgatgatagatatcggtgtatgttttgaatatcttccatttcttcgggacaaggctctgcatgccttgcttgaccgtgaatagatcattgaagtaccaccggaacttcttttccagattgtctgggtctccaagaaagttttcgagtgtctctttgaattggctttgggcgtaaagctcgatagcctggatgaatttgtccttgtagccccgcacagtcttggggccaatgttcatggacttgaaacgacttgcgaggtccttgtggtctttctgggcctcttgcaacgctcgaactgtatcatcatttttctcctcgttcaagacaacaacagcaagtcgcacgaccatactcttgttgtctgcctgcaccaatggaatgaggttcatgcaagccgtgccaaggtgatcatcgaaccactcaataacagaatccaacccctcaaagtactctgtcagagtctcttcggagctctgatcctccgccttgcgaatctgatccatagcctcatcacggaaatcccttaaccgtgatatctgcatatgagcccgcagaatattaggctgattctccatatcgtcatcatcctctctgagcaaatcctccacttcctggatatccgcgccgaaattctccagtcctcgtttcatcatgagcgtagcatcgaaatgtctttgaatccgcgcaagttggtcaatctgcgcaaagtcctccacgctatgctgcgactcggcgcatagcttgtcgatgccttgtagctcgtcttttgtcttcgagacttgtcgctggccctcagtcaaagcaccaatgctgcgttgtacggcctccagctggtctcgcagaccttcacgcaaccgggaatcaactgccgtcttcttccgcaggtattccgctttaagcccgctgatcttgtctagatcctccgggtgccgtaggaggtcttcgagtcgcggcagagcgaccgtggcatcaatgttactggcttgcgtcatggcctcggtatcaagtatatggtggtgtcgttgttccgggttgctcgaagctaggtcgaggggtgaggtgtcaacaatgcgggcatggggctttgcttgcgagaaggtagtacgcagcagtgcactatgatataaatccaggtactatcacgccggaaagagcgcagcccatagtctctcgtttcaaaatatgaaatactatatcagctatcacaggccgatagtcgtcgctgctgtcatcgggttctggcagaatacccacgtgacctaccgccttagaattggatttgcgggatcgcggccatctccatgtcggcaacatttcttcgccagatcacagggtcaattgcgcagcagatatcggctgcaaattctcaaatcaagactccggtatcatactagatccacttcgttccgttccacctattccgaatctgattccacgactccggacaaccaaaccaacctatcgaaagcacaaacatccgaatatcagatcctcttgatctgcacaatccaacatgtcctacttccgtatcaccctcatgcgctccgcaattggactcccgcgccgctcaacagatgtcctcaaggcgcttggcttgaaaaagcgtatggcaacagtcttccacagcgtctcgccctccgtcgcgggtcaaatcatgaaagtcaaggaacttgtccatgtcgaggaatgccagtaccgcctcacgaagcaggaggtgcatctcgagcgcaagcctgatcctggatattataccgaaaagagctgctctgagcagcggaaggagctcggtggtcagtgattgttttcattgagcttcgtgtggaatgggctgcttttcagactgcggttttcaccggtcttgaagattgcgatgcaagatccgactcttttgaaatccctttcgctctggtgcatgattgatcgatcacgtcctctttttttgctgttttggctttgcttgcatggagcgggttgctttttgttcgtttcttttgttcatgtatactacgtccacatctatcgggcgaatgttatatctgctaggtatccgaccgcctaaaacatttacacttcgtaagttaatctactacgaggagattattgtattatatgcatagtggaatctaacacttgaaataaatatgtgcaatttcaaaggacctggataataataacgccactgcaccagtagtttaggtaaggacagctagggggcaccaaaattatacactaggaacagtgcggataggctgagcgaagaagatacgaacaaggaaaaccgagttgttcacctaggctttgtacagggtgtccaagaagccttctgccagacggctgacgatactcttatcaggaatgctgccagcgacaccgtatagagcagaggtatcaccacgattgaggatatatgatttgccctcgcgcttgcgctgctcggccttctcaagttccttgccaatgacttcacgcagatcagcaatgagctggtcgacagccttggcagttggaatagtgaaggcacagtgaatagccgggggagattgcagagcgttgagatgccagcctttagcagacaggtcatcggcgatgtcgtaaatgtcaatggcaccgttcttgctgcggaaggcgaccacactgacgatggggtcaccgaggatctccatgtgcagtgagatggttggatcggtccgaacggccgtctcgaacttccgtgccgcgttgatgatatcggtgcagctgttgatgtatccgttctcgccgacgctcatcagactggcccaacaaccggcgatcagagcgccagggcgggagcccgccacggagggagaagcataaacaccgccggaccaatcggggtagatgaagtactggttgtttcggtatgatttgttgcggtagatcaagaccgagttgcccttgggcgcgaacccgtacttgtgggtgtcaacactgatgctagtcacacctggttggcggaagtcaaagccaccttcttcctcgtagggcgaggggaatccggccttcttgaggtatgcaacgacgaaagatcccaagcagcagtcaacgtggagagggatcttgtacttggtagccagacgcgatagagctgggatatcatcgacaatgccgtgggggaagttaggtgccgatccgacaagaaggacggtattgggattgattaaacggcgaacagcatgcacgtcgaccttgaactcgggctccgggcaagggactcggtgcagcttgatcttgaagtagttgcatgccttgataaatgccgcgtgtgctgtatcgggaataatcctacgatgatcgatcagtcctgctggtcaatggtatagtatccccatgccaacttacatctcgggctcagtaacaccgcgctccaaaaaagccttttgccgggcggccaagcaagccataagaatagactccgtgccaccgctagtggttacaccggcaccatccaagggggcattgaagagagcaagaacctagagcagacatcagccgaaaggctccaccaaatacgatactctcgatatagaatgtcatacataccatagcaaccacctcagcctccatcttccgaacaccagggaaaacatccggatgaatcggattcgcgacaccgaactgcccgaatgcttcagcctggagtttcaacagctccgcgcctccatgataaacggcaccgctaacgcgaccatcttcccagcgtgtatgttcaagcccagccaacttatcaagttcagcgcggacctgctctggcgaccaaccctccttgggcagggtaagataccgtgtgacatccggcccagagtttaccagtttcgactcgagtttcgtgatagcagtgctcacttgcttgtcgacctgcccgctgacaccagggacacgcaggaagaggccatagcagaacaggcggagcgagatgtagatgttgcggatgctgccgaagatgccgtagccgcggatggagtagaaggtcttgcgcgtataccgaaggatgaacaggataaatacgatgttgcgaatactggatcgagagcaaaatgcgtcagtggtgattgcgtttatgtctttcgttccttgattgcgcggggaacgggggattattcaacttacaggtcgatattcaaggcagagaggtgcgcgctggacacccggccgtagccgaccagcttgttctgcagagcgactggcagcatagaagagctcattgttccccctatgaatagtctgcaataatgatgggtgagagtggcgatagggaggttccgagtagtacgttagtacgttttaactggttgagtctagcgggcctcggctgccacatgaagtaggcactcaacgttttgcatacaatgacgagacattggatattatagaggttgagtattgatagacttgaaattatagctattcacgcggtattataataatatctttatatctttacaagttagagtgacccttcatatcaagtcctggtctttctccactgacgtaatttgaactagtacggaatacgatgtaactaactaaatgcaaacagtctcaagttcggaataagttactgcctcttctgcgctaaatgtacaaagaaaggagaactctcttctcctaacacgaatgtgtttttgggtcccccaaaagaaaagaaagaagaaaaaaacagcaagacttttcagacccttatatggaaaaaatgtcaaaacaaatgaaaaagcatcaaatcatcaggtatcccgccacgcccgaattttgcccaagccactgtcagatggcatgatacaatatatgtattggtcaaaggaaatcgcctataccgcaagaccggcagcctgagccgcaaggagctccttctccttggcggcgaatgcggcctgctcctcggcgctcaggtcaagaaggggcttgttctcgccggacttcaagttacggtggtaggcgcggataatgctgtcggcatcatcgacggcaataggacggatatcagccatagccttaatcttggcagtgcactccttgtattgagcgtcagtcatctcaagcttgagctgctgggcacgcgacttgatggcgttccatccggtcaaacgggaggcgaagtggacgtagcgggtcatgccgaagtcggcagggttgataatctcgtaggtgctggggttgttgaggatagccttggcgtggataccagccttgtgggtgaaggcgcagaaaccggtgatgtagttgttgaaaggaatgttgacctcaacggcctcggcgacgaggtcctcaatctccttgagcttctcaagcttgtacttgcccttgacgtagtcgcggtcggcgaccatcatgcgggccatcaggccaccgagaggggtgataccgttacgctcgccgataccgagaaccgaggtatcaatgtgagtggcaccggcctcgagggcacagaaggcattggcaatggcacagccagtgtcattgtggaagtgagtctcgatgtcacagccaacaacaccgcgcagaacacggacgagctcgtaaacctggcggggggaagcgcagccaacggtgtcggcaataccaacacggttcacaccaaccttgtccacggcggagtagattgacagaaggtcaaccaggtcggaacggaaagagtcctcactggagaagcggatctcaatgcccttagacttgacgaactcgataacttcaatggcggcgttcttgatgtaggtcatgtccttgccgtgagagtgctcacggaggtaagaggaagtaccgataacaacatcactacggaaagtcagttcggagtcaagaaaataggacaaaatgacacgactcacactccatcaacaccggtctcaacagcaatacgggcatcgtccatgtggcagcgaatgtgagtgagaatctgaacatgtcattagataccaataatcacgagatcagagcagaaccctaacataccttagccttcaggccaagcttgcaaatggcctcgcaatccgcacgggactgctcagaagcgcagggacttgtgagttcaatctatagagcaattttcgttaacctcagtccagggatataaagacttcgtctgtcccgcgactcacgtagtccacaccgaagtcatcgagagccttggcaatctcgatcttcttggcggtatcgaagaaggcgttggcgaactgctctccctcacgcaaagtagactcaataatcttgaagcgtgagacattgctaaggaaatcggtgacgccagcgtcgtgaccgtaggggttgcgggatgaggaggggtgtgggttttggcgagtctcaatgccaacaaaaccagtgtgatcgccatctaaataaagatcagtgggcaattctggtatattagctttcaattggcataccaggagcaatgacgccaggagcaccattgtcttgcccattgggctcggagtcggcaccagtacacatggtgcagatgggggagttgagtatgtagggtcgagattggaaaatatgaagccgggaagttcgggataattgagtaatttagaatgaagattgagatagaaaaattgagcagtatttaagatctttgtagtaagaaatcttaggaaaaagggaatgaagagtcataaattcatagcgccgaagtggtgggcggtgaatctgcgtaatggggggcacccccctcgctctcgggcggcaaaaaagaaaattttgattgtggagaggtgggggaagtacattttggaggagtatgataggatcagacagcctagcatggtctacgacctggtatgtacgatatattgcactatgactcaactgtctatcacttccaattcctcgcttcaccgaaatctgtgattgaaacagtatgtgtgatgcagtttacttcaatgcctcagaaccgacatcggaccttacctgtggggtctgactcataagcccagagctcaattcaactgacaatgcaattctcgacaaacatatgttgtatagagtgagtctataacagctatgtcattgctatcttcagggtgaggatccaagcatttgattctcattacagtatgtatccacgagtccgatgtggacgggatagtgatgtcatcatcatttccagtcttctagttggctcgagacccctgggcctgtgaaataatctgattacaaactcctaaacaaaggaagattcagttcatgctagctgcaagccccagatgacttgaaatcagtttacatacacctgcggtctttaaccaccagtacatcccaatatcagaagttaatacataaaaaagttcacttcacaaattaagccttcttgcctttttctgtcgtctagggaagatctctaagaaagatctaacaagactaccaaaacatcccactcccatcgagccaactggatcatatcattctcgatttctttcaaactctggccaagtgtgatagtcttcttcaatatcaccactcggttgtattaacattgtagctctatataatctgaccacaatttacattgattactatggaattggggttgtttcaatggtacaactaaatggttcctccagctcaacaagagtcttaacccctacggatgcaagattgagtttagtgcggctgttatagtgacaccaaagatcaatcatgcagtttggtgcatacaatctggaggtcattgtattggagtattgtattctaatccgggatacatttagtccaccaacggaaattgagagtattttgattctacatgttcctatagagaaagagtggatatcgataggggcaaatgattgcgtagatatggattcgtattcaaggcataaagagattgtatgtttttacaatattgatttcatacttacaaagtgttccattcgcaagaccaatcagatacatgcattatagaccttctgttcgaccgggttgaacgatatgcaacttgaagcaccagtgttttctagtcacatgtagtttccagcctccaagagacccaatagaaacaaaacgatcttctagtatacatcctaaagttgtggggtcgggaactttatgcacgacagaatccacatggaccgagaagattggaaaaaagatctaatcgattgcaataaaagaaatgatagtcagaaggcatttagaaggcatctggaatcaatctagaacattatctgcactaagggatggcgccattggtgcagagaaaggaggcgcgggagtgaattcaagcgttgtggttggccagcgctcaggccagctgtcgtcccaactagccatctccctctgaacaccattcttcctcttgtctctgactgtgtcatctctatccgcctttcagtcattggtatgtattctgatatcactagtttaaccttgtattaaacttgatccatcattcccgaaactgtgtcactaatctgttccacgcctcagccctcaagatgcgtttcacgtcgctcgtcaccctcctccctgccctggccatggcccaggagcaggttcccctcgcagaccgcttgcaggggtggttcaaccaggtcaagtcctacgtgccgacagcagcccccgttgattccccggtgatcgagaagctggccgagaaggttaccgagaagagtgtcacccacctgtccctggacaactggaagtccgtccttaccccgggaccccaggcagaggattggctgatctacaccactggtggcaataagacctgcttcggtcgctgcggaactgccgataaggcattcaaggtgagttgatattttgcccccgacgcgtctttcgcccgtcacaaaactctaacatcttgttctcaattcctaggaatccgtcctgttgttctccgccgatcccacctcaccccacctcggatacttggactgtgaggccaaccaggtcctgtgcgccgcctggtccgccagcgctccctccgtccagtactaccaggtccccaaggagccatctgttggcgaggagcgtgccccgactcccctccgcaacatctacctgaacgccaccaccgtcacccccgagaccatctacgagatccactccaagaagacctacgagaaggtccccctctacgagggtgctctccaccccgttgacggctgggtcgctaagtaccagctcaacatccccatgggctacgttatctggggtctcggtgctgttcccagctggctgttcatgattggtatcagtttcttcagccgtaccatgatgtaagttggaattgatttgtgcttgtcatttgatatcagtctaacaccggaattaggagccgtcgcgcaggtcctactggaaacgcccctcgtgctgcagcccccgctggtagcgcaaactaaataacctcttttggtccctgttggtgttttgggttgtatataatcagtggtagtgtattgtgacgtgtccaatatactgcttgggttggtttgtgttctttgttgggcagtcatctgtcgggaatggagcctcttcgatcttaggcctttttctagctacctttttaatcaacgtatcctagctaattatctagtaggagattgtaacagattcaccgaatatattggtaactgtttgatgccaaccttgctttgcctctgtatccaaaacattatttaaacagtatatcccattacacagtacgtcccgaaaccgataaaataatagcgaacaagaatcctcaaccactacacccttccattgactttagattcttcccgcaattgcgtgtgtatttcctcctacgaatgtgacaaagtaatttcaggcatgtattcgcttgtaatttgaataaacattcagagatacgaagtgcataaattcttcgacatgctaatgccattgtaccaatttctaggtatctaaccacccgtcaagtcgcaggcctgtaagatatcccaaatgtgtcgatccatcttctctgacatccagttcctccatatcacgaagaacctgctcgatatattcgctgacgccgctaagtttcataataagtgcaatggcgcggtggacattgagaagccggggggatggcggatctaccgtgtgatggagacttagggtaagcgatcgggtgacgggaaacaagggatcacgtaagaaaggactgcgttctgtagagtcaatcctgtactgatgttgtatgccagtatgttcgaaatagatcttgaattcgccgaatagccggtggtagtctagcgttagagtgagggcgttcataggaccgtcaataagatggattattccgggatcgaatatgtccaagatccgaagagcacttttctttgaatcgctctaggcatatcagcaccgtcaaaataccaatcctaataatcagacataccaaatcggtttcaccagaagctaccgtcgtcagacaataagggaaaatttgggcaacctccaagtattgaaattgatcgctagactcatccttcaataggttcccgtcatcatcagcacaaaattccgcattctcctcgaaacgctttctggctgctgctctatcgaatttgcgagacactacacagcggtggcggtcgcgtagaagacaagtctgctgccacgttccgatctgtgttgagttctgtagcgatgataacgatatgggcgttggctgtgatgtcttgactgatgatactctaactgcaattgcgaatgagcatatacttactagaggaccattatatatataagagattaacgaacggggaaggagaaaattttcaacgatatactcagcaaacatttctaggctctcgtgaagcttgtttatttgttctggctcccatgaagaaaatccttcgaagaattccaaggcgtgagtaatatcagaatcgaaggcatgtccttcatcatcaagcaggtccttatggatatacgagaggaagaaagtcacaaaggtatccggcgatttaacgtgctcgagagcagcctggataagtgacgcaggccgatagcccttccgaacggtcttctcggagccataatgccgtataagcctgatcactaggttccttgccgacttgtgctgttgtggtgttaatgataagggcattgagaagtctaaagccccctctatggagggatggtgacggtgagtcgccatcgctagaaccttgcgagccttagggtgaggcgaggaagtagaaagccaaagccagaaccggcgcaacgaagtcacacaattgagaatattgatacatcttatatagaatataaagacatccagtctctaataatgtgtttcatctgaaatctatcaaactaacgaagaaaaatgagcccaaggtgggcgcagtggaacaaaacgtgaagtctagggcggtcgagcttccctcaaatttcatttcgccaggccgagatctccaaccaccaactaaccaactcaaaatggccgccccagtaccgttagatcgcataccccccacgacggccgcctatgtgattgcaacagccatcattgcaggcgtgaccggatattttatcggccaaggctcctcaatcagcctcttcaaagaaaaggaagggtggccaaacagctacgatgtgaaggtccacagccactcctccgacgaggaggacgaatcagactctgaagaaggagagaccgacgatgaagatgagggcaacggcgaagaactgtcgagcttcaaggataacagcgaggaggtgaagctggtgctcgtcgttcgcatggacctaggcatgaccaaaggtatgtgttcttcgcgcaacgtttcaattattcctcacatttgtgttgcaagcgcttacaatctcttccttctaggcaaaatcgccgctcaatgcggccacgctacccttgcttgctacaaatacttcctcgaatacgcacctgactcgcctatcctcagaaaatgggagcgcggtggccaggccaagatcgcattgcaggtcaagtccgaggatgagctgctggtgatgcaggctcaggctattagccttggactttgcgcgcgcgttatccaggatgctgggcgcactcaaattgcaagtggcagcaagaccgtgctaggaatcttgggacccagaagcgtggttgacggggtgacaggacacttgaagctgttgtaaatggttacacattatacatttgctcgtttggcatttagataggcaatgacgatcatgacctcgacgaccaggtttccgacgttaccgtatccatcgcgttgagcatgcgacacacggtgatacatcacatgcggacatagtcgacataattgtagcacgtttcctagataccctagtcgcgcaaaaaggggacctcctttgaatctaggagctttatagtggaattacgagttctatataagagatgttggcaagtcatggttattccctaacctcagcggccaacggccaatcggcaaagagatatgaaatatgacgccgtccgacaaccaagctatcaagccgagctcaccagtgggagctcaagacccgcgtcacaaggcgcagacaattattctgagatctgtcgaccggaaaccgtaaaggccatccacaaaaatgatggctccaagctcgtcgaaatgcccagctctcaaccaccacacagaaaccagtcagactggagtccatggacaggaaatctaggcacagatccggttttggtaaagaagaaaaagaggaagggaaaagcggaaaggctcttatttatgtccccaagtggggccggtaagattttatggcgctagcctagatagggatagtgcaatgtgatcacatcacgtgatccgattgcggttatcaggaatccaaacggcgttgcgctgatagccattagtacctttccatccctccttcacacaccgtcaaaatggcggacgctctatccatcgagcaaaacaacaagattcgagtggctcttggcctcaagccactcccagttcctggcgccggccctgaattcagagaagacgacgacagcgagcccggcgaggaagaagacccagccagcactctcgagtcgcgacaggcggaaagttatgaaaactggaagaagatccaggacaccgccgaagcgaaacggaaacgagatgagaagaatgccgccatcaagcgggcgcgtgacattgcccaacggaatatacagctccaaggatcgacactaggcgaggcgaatggcgacgaactcgataccaaagcctggctgtcacaatccaaaaagcgccagaagaaaatcgagaaagaacgcgcccagagacttgccgaggaactcgaagagcgggagcgcgttgcagaagccgagtacactgcagcggatttggctggtatcaaggtcggacactctgcgggtgctttcgatggtggtgaagatcacatcctgacgcttaaggacgccgcggtggatgatgaggaagaggacgatgagctccaaaacctcgatttggtcgagaaggaaagaaccgaagagaggctggagcttaagaagaaaaagcctgtctacgatcccacggcggagaaccagggtctcctttcacaatacgacgaggagatcgatggcaaaaagcgaaagagatttacactcgacgcccaaggttcaaccgaagaacgcgaagcaaagcgacaggaagtttccaaccagttgcggaagaacattatcagcctcgactttgaaccggaaatgccatcatccgattacatggacatcagcgaagtcaaaattaagaagcctaagaagaagaaggccaaagctacaaaacagaggactttgatagacgaggatgacgttgctccggttgcggattcgaccgatacacaaggatcttcagctatggatattgattcgaagggtggagtcccagtttctgctccccgcaagcccatcaacgaagatgtttctttcgtggatgacgatgaccttcaagcctctcttgcgttgcaacgacgagcagctttcaagaagcgcaagaagatcagccctgaggagcttgctaagcagcttcgagaagaggagactcagaccccgatggatattgaaaattcggataacgagggcgaggggcctggccttgttatcgacgaaacctcggaatttgtggcaaatctacacaagcctacacttctggagcaagaagaaaaacacgctacaaccgcggccaaagagcgcgaaagttccaacgcggagcccgagggtgagggcgtcgagatcgatatggaccgttacggcgatattgaagacgaagaggaacttgctgcgcgcatcaagcgcgatgaagtatctgcggcccagccaccacaacttaccggcaccggcctagaagaggaatcaactctagaccatggtcttgctgctactctatcaatgttgaaatcgcgcggtctcgtcaaagacaacgacagcaccagccaaaacgctctcatgcgtgatcgccagcgtttcttggccgacaagtcgaaccgcgagtccgaaatcgagcgacgcgcccgacagcagcgtgagcgggaccgtacctctggtaagcttgatcgcatgtcagcccgcgagcgcgaggagcacgcgcgctgggagaacaagcatcgtgaccagcaggaagcacgtcatatcgccgaggtattcaaccgcgaatacaagcccgacgtgcaactgcggtatgtggatgagttcggtcgcaacatgaaccagaaggaagcattcaagcaacttagtcaccagttccacggcaagggcagtggaaagatgaagaccgagaagcgcctcaagaagatcgacgaagagaagaagcgcgagtctatgagcacgctggacagcagccagaacaccggcatgaacactgctgtgggcactgctgcgcgcaagaatcgccaggctggggttcgcctgggctgatgctttttctttcttcccaatagccaaataccaatttacgatatccaaagtctagcccaaaagtccttccgaagctccgtagatccgcagatatatttagatagttatatttaggcctgatcagttagacgatcaggcaacgttgctgtagggagaagacggatgtcaccaagttcaatcttatgtatccgacttcgtacatatgggattgacatacaggtatttaacccagttgtccctatacaaccttagaaaataatcaaggtggtcggaatgtcagacacgaggaaaaatggagaattccttctccaactgtgaggggaaaaacggtgtagatccagacagatcagttcaccggagattcgacttgccgacaactgtagaaatgggctgatgttgctatacatgcgcgaatggatatatataaggaacgcacgaatgaatccagccaatgaatcatatcctaaaccctagatatcattacaattccctcatctctagcaactaaatcatagagaacaacaaatatttagccggaggattgctgcaaattccgattggttgtacctggtacctccacccaggcggagatgcataccaactcgcaggtacccgataccgctatcacatgagtcagggcaaaaacatcgggactacgtctccggtcctttatattccttcgctctcccgatccttcccttcctccttccaatcccaaatccaggaggtccaggtcttgccctttcgattttcttcgtctactctgccattatgctttccactttcagagtcgccagccggtcggctgccccccgtggggtcaacttgcgtaccgtcttgatcggagctagaaacgcatcggcctgggccaatgttccccagggtcctcctgtaagctttgtgcttgcaaccaccgtaatcgtggtttgaaaggccaattctaacgtagctcggttaataggacgccattctcggtatcaccgaagctttcaaggccgactccttcaaggagaagatcaatctcggcgtgggtgcctaccgtaagcctcgtcccgaacaatcgtgtcgcgtaatggattgctgacgagtcattccgctgttttaggtgacgacaagggcaagccttacgtcctgccctctgtccgtgccgctgaggacaaggtcgtcgcagaccgcatggacaaggagtacgctggcatcaccggtgttcccagtttcactacagccgccgcggagctcgcctacggcgctgactcctccgccatcaaggacaaccgcctcgtcatcactcagactatctccggcaccggtgccctgcgcattggcggtgctttcctccagcggttttaccccggcgcgaagaagatctacatccccaaccccagctgggctaaccacaaggctgtcttctccgactccggtctcgaggtcgcccagtacagctactacaacaaggacaccattggcctcgacttcgagggtctgattgccgatatcaaggccgcccccgagggcagcatcattctgctccacgcttgcgctcacaaccccaccggtgtcgaccctaccgaggcgcagtggcgtcagatcagcgatgtcatgaagcagaagggtcacttcgccttcttcgacatggcctaccagggctttgccagcggcaacgccgacaaggatgcctttgctccccgccacttcgtcaaggagggccacaacatcgctctttgccagagtttcgccaagaacatgggtctgtacggcgagcgtgtcggtgctttctccctcgtttgcgagaacgccgaggagaagaagcgtgtcgattcgcagatcaagatcctcattcgtcccttctactccaaccctcccgttcacggcgcccgtgtcgcctccaccattatgaacgaccctgctcttaacaagcagtggctcggtgaggtcgagggcatggctagccgcatcattgagatgcgcgctcttctccgcaccaaccttgagaagctcggcagcaagcacgactggtcccacatcaccagccaggtgagatctcaaaactcgatttcctaagtatgatccaaatgactaacatgatattccagatcggcatgttcgcctacactggcttgaagcccgagcagatggacacccttgctaaggaggtaagatttatacccgcatactttctctagtctgatcgctaacgactcccctagcactctgtctacgctaccaaggacggccgtatctccgtcgctggtatcaccaccggaaacgtcaagagactcgccgagtctatcttcaaggttactggttaaatgcaaaaccgcttgaaaagaaatcttgaaggatatacgataaaaaatgaatgttaggggagtgagagaaaccgggcctgggtttcgttttaaaatctcggtcctcttgtactgatatctaatgtctctgtttcaaattagcattgttcggctctgtccgtcttaacggggattttggattcgttttctacattgttcttttcttgttcttgtggaaaatactctgtaaactcatgtagtccattgctctctcatcggcattataactttggatttatgccctgattaggcttacagcccgtaatgaattatgtacctatgttgtagatgagaatcttgatatgctaactaaatggggttagtcctggtgaaatttagccctaagccctagttcgctcgatggggccgtgtcaccgcgtgacttatgtacatagtcaccccacaaaatatttgaacattctattgatagttcacccgttacttttttctcagccaatcaatttcttccgcatccataccacaatggccccaaaaagaaaaagatcgacgttaccatccaaactccgacgatacgattggcacggcatcgggaccctggtccgagcgcatcacggctagaccagcgaggcttatccacaatgtccactgagttggcggacgattggtcgactctagcagcaaaagcgcaggcacgggtttctcaatacaaacctcagcagcatcagcaacacgcaaatttcctccccgtgtccctaaatgcatttattacctggctacctgaaggtgggcgtgaatctctagctagggacattaataggttcaaaatccgacaaccaactttatgatgtctttagcaatttgcttacaggtcttgcttcttgttacaccgagtggctacaccgagtgagtctaggaaatacttgtctagagtaacatcgagcactaatcaatcctcgggattagtgagagcacgttcaaagccaccatcagtcagcccctccccgcacgcaaaacgcgaggcgcatgttgaggctgtagcagccacgcttacccaaccagaaaagcgaacgtcacagttcaaggaactctgtctcaaacgcgatgataatcgttgcgtgatcactggcgaactagacattgaatactgggaggagcttaaccgcccagaggaaccctatttcggacggaccgaaggcgcgcatatcattccgttttgctatgcatcatgggaaagcgccgaggtattatacctgcagtgaataaatgattatatacaaatgaaatgataggatggcaagtggaacctgccggcaatgggaggttttataccgctgctttccccttgtcagacaagtccaagaaggaatcagtactgaaacaatcaatgacacctcaaatgggatgaccctacgcgcgaacatccatgacgagtttaggagatttaccatcgcattaaagccaactgtaagtagccaatggcacatcgtatgtattacggtctgatctcactgacatacaaatgcggcattaaaaccaagagaatatataccaatgctttcccgcctccctatacgagttagagcagtagcactgcccacaagtggcaccatccacttgacgcaaccgatggtgcgcaggacttaggatgggacatgttattgaccgttatctcagagactgggaggacatcaagtgcgaggccacaaaatccctcgatgaggctgggggaacaaatgtcaatgagtttctgcaggctggtctgtgggagcatgttcttgcttgaaatgacaatcctcgtgcctttttattcattaaagccaatgatagcttcccgcactcataggccatccatgtcgatgtagagatcacctttgtcaaggatagaggatgtgtgagtgactagctttacttgaccaaattttggatggaatagtacccttccaaggtctaaaactaggttgataggaccgatcttaactggcgtgggtcgagacatctcctgaataataacctcgtgggaagaaaaggatatagatatagtcttagatagacaaaaaaacacattgccgggcatgtcattaccatctctatataactatactttcagcgagatcaagtaccttaatctcttccctattccaagatttgttctaggagttgagtaactatctacaagacatggataaactaactaagccaaatgcgtacaaggactgtatgcagccaacgctccacagtgaatcaatacagcctagaccgcgccgatgagtctgtacgacacataatgtgctggcagcagcccccctccgccctacgttgcatctacacaccgttctttccacgtcgtctcactggttaataaatgaattgccaagactcaatgtactccagctatagagcttgtaacagtcatacccaccttgatgcaaatcgggcctgagttaagcaaggatctacaacgctgcggctaggctcattgagtagcttggacgacctcggatgtccacggatatgacacgcctttactcaatccaaactccaaagtggcttagaaagagcacctagcgtcatatgacggggcaatattagctacatgcctgggcagttagagtagtatatgaagaccgagaatgtggagtgtagtgttgctaaaatggtaggcagaggaacaaattcaaaaaggaaacatgtattaagaatctgtcagttttggggtaatatgcaatcgaagagaaattttgtccagtgaccccttccgcaacaccaagtgcgccataacttccaccttttagaaagccaaatgaatcagtatcctatcattccgctgacgcctatatccgagccagcgcccagaggtccgagagagggacagatgcagcctggaggtgcattagcggcagagtatgggtaccactccggggatggagaaggggtgacagatcggcccatgacacgggctaagatattagcaggtgagtgggcagagccttggcttgaattgagaagagcgaagcggaggaagacctcggaggttgtaacaatgattgaaatgacgatgaggacaatgataatccaagtttggtctagagtgaggttagctgaaaggttagggagcgaaaagagaaggtcagacatacgggaagtgcggttgtcggcaatcgagtcggacaagatttctgcaagatcgaggaatacgcgacatctctcgttgaggacctggatgcgtggtttgatctccaaatactcgcgcacggcgatgtagagcgggtaaagggttggctcgctctcccagaagaagttggggacgtcgagcatattagaagctagtggaaaatgttagtagggaataaatcttacctgcagcatagcgtgcaggacgacccaaaaagggggtaaggaacttacaaaggttgacctcgacacgactcttgaacaatcgacccaagatccggaagacttcttcgcgcttcatgcccagttggcctgaaactgcaagacgtgtggggacgtctttagcatccgccatctgtcgggccataacttcctcgaagaagcagagtttagtgctctgtgcaataccatggctaatagcgagcttgatcatgtggtcgccactgcgaagagtaatcatatcgttatagactcgcgggcgcgagatctcagtcgaatactcgaaatggaactcttctgtctcaaagtcctcctcatcaagaggcatcgtcgctagagggatagggataccagttgcagatgatgttgcaaatgccagatcggccagcaggtctttctcttgtcgctcggtgaagttccagaagacgacaacgccgtaactgaaaacgaacatttcagccacattgtataacgtccgagctggggcttgcggtgttgaagacgaggaggatgtaggggctggcagagagggacggtctcgaataaaagtgtgggtatcatccgtgctgtgtcttcggcggcgaagtgcaggttcaggcgaagattgcccagtcctttggttgctgtctggttgcgggagtggcgagatatgctgcaacccatcgacactagagccggagctggtagcttgttcatggtcatcggggaggtggccacgaatgtcttcactgacaccattcaagaattccgcatgatttccctcctgggaatcatgaacctcaggctgtggcggcgcttcataatggtgctcatcctctggacgattgtgtccaccaaccgagtgttcctccgtctcaagcatatattcatcatgatgatcacgaagttcattccgttcaatctcctcatccaacaaggattttccaccggggtatttcagcacagggctactccgcagacgatacccctcgtggcccggcaaaagaggaagatgatacgcggtgtagagacaatcatcatagagctttgttcgcccaccatgctgctccttaacaaaagtagcaagcgatcccatcttatacgcctgggctgtacagtacgccgtaacacgcgcaagcttttccgtccggcgcgcctttggcaatcgctctgcataactcttcgcgcgctcaggagcaatacggcgtttcttcatgacttcttcctcatccagcaggggtgcaaaatcattatcaatgccgaaatcacccccaagtcgcttcgacacaagcaattggcgtctgatcctttccgggtcgatatttttctccttggctagacgcgcgacaagctcctcgtccacgaggtcggcaccatcggagtcatcgtcttcttcaatttcaccctcctccagttcgccggtgtcgggcagaagaaccagcttttcactgactttcgtcgttcgaggcgggagtcgcggttgcgcggcgagtcggcccatcgtgccgccggatcctgctgctgtgctgctgcctgagctagttatcaagcctccagatgcggaggcaagacggcgtgcccgtgaaattggtggtgggccgcgctgctgcattgaagggacgtcagaggcgtattggaggacgttgtcgacggtgatgaatcgggttgcgggcgagcggcgtcgtcgcggtatttggggctgttgctggtctctggaatctgtgacctgtattcaaaatatgtgttagttgagcttggttgtgcggttgatttgatagtcaatcctaccaagacagttgggctgcgctggctagtccctcgtcctcgggccggcggagtcattgtcaaacgagcttagaataagcgcttgagtatgtttgtttgtaactatttgccggcactttccaacatagaagagataattgaccgtgtatgtatcaattgctatgtctgatgctccgagccagcaagttcgaatggcctcgagactaaacccaactgggaatagttcattgagcgaccaaatgacgtctactcttacagtcacgtgcatctcattcactaggtcatcccgtgacactgccacgtgctacaccgctcaatggatcagggcccacagtacctcattgggactagcagattgcagatggcgttttggtcgatctggggtaaagtgaagatcggccggaagctggttctagtgcttgttgactacaaaatgaggtgagactgaggtattgatattttgtctatttgtgaggtctcattggtttccgaggtcaatgtggctcttgactaactgtttgtgctcattggtggcctagctatccgaaagcaaagtgctagaacatggaaggaaaattgggtaataataatatgaattgctatggtaacgatgagagatatgagagataaacataaaaacgccgtgctgtcggttcatttggcactcttccgagggcgaactggtcatgcagatgggatagaagagaataacgaaattagattacgaatgaaggccatcacgaagctgccgatcttcgtcccagatttccttcttcatgcgctgtagatgaatgtgctgcttttgcagcttgtcgaggtcgacttgaggtggattggggagcgctgcaagggagtcatgtaggttgcggtacttggtgtaaaagttcttgaatttctgagatttctcccgcagctgctgtctcagaatttcgtagctcattggtggagatgcactaccagtgctgccaccgctggaggagctcaccgctcggcgacgcttagcttccaagtttccagtaggacgtcccgcctggggcgcggacaattgatcagattcggccttgcgcttcaatgggttggtggtagtggaggtagccttcgcgatgccattggtctgtggagtagctctggcaggtttggctgcggcagaggctgcacggcccactttgggtttggccagctgggtgatgagaggcgaagatgaagatgaaccggaggattgattctggctgtccgctcggctgcggttgctaccggtagagtcgaacacgttggaaggaggggaggagccgagtggagacggcttctgcggtgaagtcgagggccgagaggggggacgcttggaacttgtaaccttggcagccggtttggatggttcaagcttaggtttcgatgtctcgggtttattcttgggcgccggagcaggagcagatgagactgggggagtatcggcggtgcgagccttggacggtgccttgattttcggtgctgggggcttcgaattggatggagtccgcttgtgttccttcggttgctgcttgggtgcaggcgcgggagcgggggcgggggcgggggcaggggaaatatcttgcatgtcggtatcatcatcttcgtccgaactgtggacgaattctgcggacttgatcttgctgtccactttgactggggccttcccaccagtcttcttcgtaacccgtccggtgagggtactgttggtattcttgggtttggtagaccgtttcgtcgggtccttgtcgcgggctttttgtgaggccgaagcagtcttgggagcaggcgcggatccctttgtagcgcggtcggtctcattgtccttgcccgagtcttccccattggctttggcggatggtgcggcaggtttctggggtgggccagtacgaaggttcaaacgcgaaaggcactttcccttgcctcgttcagcctttggaagcagtgtttgccaaagtttgtcggaccgagagatgcgcatgcgatcgaaggcagagatagaattctcaatggcctctttccggtcctcctcggtataattgaaaccaaacacatcaagatccttgtaaactttgtccttgagatcatatttctcggggttgattcggttcagaactccgaatttctcgccgagggcggtgcaatcgtcgacggtggtgcgggtttggcgggcaaggaacttggccgagacggcacggacagcgagaaggtgaatgaagggaaccttgagggcttcaagcctcgcacggtctttgttctccatcattggagcagatgttggagtcattgcaaaagaaggcgacttgggagcacccaagataggacttgcggtgagggaacgattggcagcagtcttgaggaaacgatctttctcgagctcgactttggtggtgggacctttgtagcctgacttgctgccccgaagagccttcagctcatctgggtgtgagatgatgtgagtcttcttcgactcctttccccgctcatgggcattcaatttttcctccaaatctgccagcgcctgatcggtggccgcagtggcatttttagccttttccacctcgaggctatggctcaacaccccggtgaagtacagtgtctctttatcggatgagctgtggtagatctcggatcggtgtgtttcggggtaggcatggaacatttgagatttgcctccgtagtgaagtgacgggtgttttcccagccggactcgagccggttgatccttccgtagactctggatcagatcatcgagggtgctctgcaccaaattcaatcgcatgatctggtttggcttgacagaaggatcaccggactcatctccgaggtggagagacagcccggtcgggggaatattcagactggtcgacattatgggagtggaggagaggtcagggtagggaggaagggagagggattcgagattgtgagcagggtcggatggcagcgtgagagctgcaggtcaggcggccaactgcacgagggaatgaggtaaaaccatacgccataagatcggcgttgaaaatatggaataagaggaatcaatgcagaatgtaggatgcaaatggtatagacagagaagtgaagaagaagaaagatgaggagaagggcagaaaggccaagagcaaggcgaagcgtcggagagtggggagagctgacggcgattccttgtaaaattacaggggattttcccgattttcctttttttttttctttttctctaattaattgtccatgtacgggtattctcctatgaggaagtacgaagtacgaatgtgcaaatgtgcttatgctagtatagtattgaagacttgaacatatcacactcctaatgctctatttcctccagtccactccgtttgatactgtatcggcctttgttctgactccaagtccaacttgtaaacttcttttcttcctttttccttctttcccctttgttctccgaaacccactacataagtacctgactacttacaactatcctactaatatatagtcaactccaatatatacacctaactactccgtagactcggcctacacctgtatacccaatcgtaccaagcgcagccgactactcgcaatctagacaattactattacaatacaattaccgtgaggagaaaaaaagcgatgctccatcacggggcttcccgagtccagtcttgtttaccgatgcgggtgcggtcgggtctcatttgacttccatatagattaaaggttcgtaactatgtttggttaaagaactctgacagcaggtctctctaacggcttgggttgactcaacagacagctgaatccaaaaccctgggagaaaaacattccattctttctccaaaaatcacccggggtactcatcatttccccgagatacctcaggaatgccacaacctggtttgcccctcgttcatatgcacccaggcacggatagccaacccgaaaggtcccagttcaagtgttaccattcaatgtttcgccctacatcggactagtgggcttgctacggacgcttactcctttcgataggctaacgggaaacggggccaattcctcgtaccacatgttatcgggctcctattctggctacggggtacttttagcctttcttgcattcgactatgagatgacccgggcccgaacggcgcaaatcaccatagagtggtcgtctccatggccatccccaggctatagactgaatgccacctggtgttcctcttccttattggatcttgagtttcacagctgcatggaaggtccatttatgcatcccaatggagcaatggagagcaagccattaggctccggggtgtatattgtactccgtattacgcccttcttattttttattccttttttattctttatccttttactctttctgttcctttgcagtttcgcccccatgttgggtgctggactggtcaattccagtcgatcccaatcaacccaaattaaataacagtggcaaacccaaataagatcaagttacagttacattgcgagtccagtataagcagtgtacacaaatgacctgcatggcctactcaacctgggcaagtgtaattcttcataagccggagaggggaataccgtggatcccttgcgccgtccggcttattctccaattgtctagtctgagacaaggggaaatattagccattgcccattgtttgccttgctcgatctgcgcagatccgtgcagaactgtcggctccgaaaatcctcttcgtcatcgtttctacctcgtattcaatggctcaggacattatcaaactttgaagttgataatcagattaaggactctatgaatttggaataattctacaaatctccaatatccaattctgcaccccaaattaacccatcccacaacgacatcgtcaaaacttccgcagcctcatcccaacagcctccatgattgcctcactaccaacaccccccgcgatcgcaacagggtcctataggatcgccgccgtgatcggcgccgacgataacgccctaacaaaaccccaatatctgaccgcgatagccgcaatcgccgttcgcgctatgaaccctaccaagccactgaccgtcgatggcaaaatggacacgatgtctccgagttggcagataccattacgcaggtaatcgctctaggtgctgtaggatataatctcgaagatatagacgcgactggcgtgctgcgatcggtaaatgaggctacggcataggttggggttgttgtttattgtccaggcggcaggaaggctgggtttcctgactttgttccataaggggtatagttaatgtgacgatgaatttgcaagtggcatttctgagggtgaacaagattcgggggttgggcgttgcaaggtttagtattgggccggagttgtggcgaactgctatgaagacgtttactgagcgggccgaggtgtcggccttgtgagtacatacgctgttcttgcctacacaaatacatggatatattacgtttgactcataggttaggcattcaaacgtcatgcagcctaaaataaaccgtcgagctttaattcaatataacatttgaagtcattaattgattccgagtacagttgctgtcggcatcggcgatcctgaaccatcaggtccggctacaaatcccattggtgcagatattcccataacagcagtgttcgtcgacaacgcaaggcccattgtcctcgctacaagacggccacctatcatctgtcgatcggcatttgttggcagcgcagtagcccgagcagcattgattgttcggggtgccgaactcacaggatgctagtattaattagtggtacgttcaaagttgtgattggatgtgatatctcaattcttacagtagactcccgcgcaagtgggtgttgggacacaggttgtgatagtcgttgtagagggtgagacaaaggttgctgttgtgcatgtctcggtgagaacgcaagccggagcactaccacatcctcctgctgaacaagctgctgcttctattttgagggaaggtgtggttagtagggtgggggcgaatgtaggtgtttgttgggatacatacggctcagggcgaggtgagcataggtaagaataagagccttccagagatgcatctttctggcgtagatatttaggtcttagttatgcgagaacagagtgtgctcagttgattagagaaattattcagtaagaccttctgtcggtgtctatatatacatcacacaccaagacatacaaatgcgtcaactctagggcaaaccgtggaacacacggccagatgacctgatacgaagccatctacatcagttgatagtaatgttccaagctcagaccattagccactaccccagactttctatttctgccacggtcgatgtttctcctaacgtcatatcaatacgagggtcaacacgaggacttcattaaactcatattcaattggccttcatgtgagacactattcatcattcaagactatgcttccttcggttttgttcctgttttcctttttatagcaacgtgatgactatgatgttgctgggtaaaattgccgactagtggaatcatgcttggaattgatcacatttttatctcgtatcaaatcatgaattaataataaatctcaaaacacatgttagtatatggcacatgacaccaagcctaaaattagcccgtatagagaagaaataaatggcaagaattcttcactatacgactcgccaacctctatcgaatgaacgagttggtgcgacttgagactctgtcccgttcgaagctgccagaaatatgttcaaatcttcaaatcatcctctgggtcactcactccaaagtaacggacatattccgttgattttagcgtttacatcaccgctggatctgatgagaagcttcaacatcggcattcaaccgcaagccactgcacaattgatcaatcctccagataacaggttgcatccttctgaagaattgtcccgagggtactctcatggcctgcgagaagcgcactaaccgcgggatgggttggtggggtccaggtttgctcgcccacacagtcgttcaattgagccccgtgattcaggagcagaattacaacagcatcatttccagcgctcacggctatactcaggggtgtctctctttcgaaatcagatggaagtttaggtgaaatgcgatatggggacctaggggccggaagaggggtccgaggtagaggcccaagaaacctaggtggaaagcggcgaatcggttctggttttttgactggcatggatgggacatccacataggccccccagtagagcacgcctctttcattttccttggcaacacatttaagccttggctttccgagcacttcacattttgttgatacagacgggcaagaagaaggtcgtataggtgatagttcacctgtagtaggtgcgagagatccacctcggatttcagattcgtacttatcaagagtaacaactcattgggtagttcaagtaacgaaaccatagggttgaaagtgatgtgcgatatcaaagagtacgaattagaaaggacgtcagtccactagcgcggggctgtgtacgggctaacacaagaactaaaaactgccaacagcgcacagcgcaggtgcgtgatcgattcagaattggagcggccccaaatgttgatatcattcctgttgatttacttcaaatagtgcaagacgatgttttagaaccttcgaagtaacctcgacttataaagatagacacaccacatttctgcaccgccatggtggttgctattacactagattactggcctggtatcgagtgacaggcttttctaagaagtcagtgtctcctcatcctagaatattatagttcagatccgcgttctacaactttagcggagaatatgtaccttttatatgggaaacgcatacaaaagatacctcgaaactgtatggtttctaacccctccaggcctttgggaattggggtcgcgaaggcgagctaggcttttcgactaaatcccaactccgctctgccatcaatcgggaccaaagtttgacattcggttctcatggctccccgtaatccagagtgagtcctcgaacatgtgcatctacatacgacaattagcggaggcattaaagtcaacatacgaattctgtaatcggcgaagctaacacagatcaccagcttccccgcagtccgcgcctgcattttcgacatggacgggcttctcatcaactctgaagacataatcagtctatccacgaaccaactgctggaaaggtatggaaggcctccgttgactccgtcgattcgagcccagctcatgggtgtcgcagactcgacaaatggcgacatattccacaactgggccaaattacctatcttccgcgagcgattcgcccgtgaatcaagcgagggcatgcgactacatttcccggattgcaggccgttgcctggcgcggagaagattctatcgaatctaagccgtgcacggagtgcttcgtctggggacatgattcagctggctttggcttccagcactaagacccagagttatgagttgaaaactgcggggccagaatcgaaaacactgttgagcttctttcagtcggacaggagagtcttgggtgatgatccacgcatgcgacggggtcgagggaagccagcgcccgacatttatttgctcgcgttgcagtctttgaactcgggaatagactccgaggaaaaggctatcctgcccaacgaatgtttagtcttcgaagatagcatcgctggtgcagaggctggaagacgcgctggtatgagagttgtttgggtaccgcatccagatgtggcggtcgagtatcagccgatgcataaagtcatcctggctgggagatcaggaagattgaagttcggaaatgactggcagctaggagagattgatgatggctgggcagaaattatacctagtctggaagactttgattacgagaagtacggccttgatgtggcatctcgaatatcttaatggaacagttccaattcaatttgatacctgtgtaacggcaagaatctgttcccgcatataaaaagaagaagaagataaaagaaagaaaagcgttcattaacgggcccaaaaagcaacgatctcgtcaatgtctttcatcgtcaagctcttcaaaagtcgatgctccttggtgatctcattcctcaggcgacaagcaaatcttaaggcaatagaagctttttgcatcttgcccattgccgccaacaagtttcccttgaggaaagtagtgagagcgatctcattcttatgcgcattcggatcaatcgaccaaattcccaacgcgtcgttgatcatagcactaaaaagcaatttggtagcctccggggaatctgatatagctgctgatgtatcctaagaatgtggggataaatcgctgcacaggcaggctatctgcaaccatacagcctgttgccagaggatttgggttgtggtagctctggcacgatactggtcgctgttgattaggaagttcatcgagttttctgggcctccagccaatctagctacttgccatggaagattatttgtaatgtaggatattagattaaagatcttactaaatcctgaaccctaaaatagcggtctcgctaattagatacgggtcaacaatgatagatgtgttttcttggctcggtgttgatttctattgggcagacccagtccatcggcagttgcaacgagggctcgcaaacaccaaagtatatcgttatgcagtggccgcaatatatcgatccgcggaaaggaattttgggagcagttgtgggcagtcggtctcaaggagatggatcatgacagaatcatctctcacccgcaagtcacccgcttcgtggtcaagtccatgcaccgaacaggtcttctccggcagtctcaatatgtgggattcgttgaggccgacgacgacgaggcgacaggtcttgctgccatggatttaggtttgaagaatgggtattagccaatgacgataaatgatgccgtgatacgggaaacgcagccaaagtcgacaaccatgccaatcaatcggccagggtaacatcaacattaattgaaactggggtaagaggaggacaggaatgagagggaagtgacaagtaagaagtcaaagatggacgttgcactccacggcattcgttatatctttcttatgcataggtttgtgggtttacaggctctacggaatagaggaatgggatgattccatactcttcagtaatcagcctctgctgtatgctcttttggatggatggcgcgcagggtctttttcacttgattggggcctttgtgcctgaaatttgcctggcacaaaagtaaggatacctgaattaccattacctacctgcgaatatgaagcctttggtaccatacaaatttaaatatctcaactttcttaggtggtttactggctctctccgttatgcgtaaagtaacttaaattaactctactattaccaataatagatatggttcaattccaaaacagtcatttaaatgctatatgatagagagaaaccaattgattagatacgaccggtattttatcataattgtagtgaaattgtagacttaaaattctttattgctggtaatcgtagtagtagtggtagataccatttgaattacttcatggtgatagttttatatttatatatgacggagagagctagtaaacgactggaaaagtcaagataggtaaatttgcatggtgccaaatgctctatgagacagctggcgtagatggaccctaactcggcagactcaagtccttgctttggctgaataaagcgcctgaatcgtcatatgtaactagatttactgcaacaggttggttatgctttgattggttgacgattgattgattggtgcaaattctaacaaataaccgaagtagccagatgaggcacagctcatgtttgcacggatgcttggtctataagccttttaactgactgagtcatacccgccagaacctttgtcatgagctcagccgtcatttcatcgcgaagcacgattcgcatgacttcgatgtcttccccatgtgctccccatccgcgaattgtataatctggaacaggtcaatggaagatacatcaatggagaaccggaagcgactgactcggaatagagaatttcaaatcgtgcattgcatcactgatatccgatagctgcaggttaggatactgtcgtcgggcctgatcactaagtctaaataccgcaattgggagcacatgaggaacagcttgatcacttcccttacagagcgtataacctccacctgctttttgttgccgatgagcatcgcttaagcaataaaaatacccagtctcctccaagagtacactcaaacgacgagcccgatcgagcaggctctgggtcctatcctggtaccctgcaagccccaatcgaaggaagttataatattggccagcgataggtgcaccggatctcgagaagcttaaggagaaatcgctatgggttccccggagataagaagattcgactaggaggccttgtggaatctgtgatttttcgcgccaaagtatccatcctaccgcgagaggtgccatgccgaatttatgtcctgatgcattgatagattggactcgagaaagacgaaaatccctatcaggaacatattgtattagctagtaataatcgacggagggtagatgtatgtttaccagacgaagttcgtgttggtggaagtaaaaggtaaaatgaagccaccacttgcagcatcaatgtggatagggatattatttcctgttcgaagctcgtacgcgtccagtacgtttgcaacttgctgaactaaatcacaatgtccagtgtaggtagatcccatagtcaagaagacaccgactaagaaaagtcagcactagaacgatcaatgagactggcggcatatacttgtattttcatctaagcgatcttccaatccctcgatgtccagtgaatatccacttctctcactgacaggtatgatcctggcctcgacgtcaaaataaaacgcaaatttattgacgcaaacatgcgcatttgccccaattataacattgggacgagggtacaagtgattggggtgattcagctgccattctcgtttcatagcaaggccgccgaggaggacggattcagaagagcctgtcgttgctgcaccgaaaaagccatttggggcgttccaaagatttgcaagtatagagaggcatttttctcgatagctagttggaataaagtgtcttagatgatcttctcctgagtcataatcaggccaacaagaattactcactctgctaaggacggatactcatgaatgcatgcttggtttcgtagaccaccagagatcatgagatcgatagcagtctcatcgaacttggtagttgtgaatcttcatacatcagcaattctttcagttcaaaattgatcgttcagcaacttacctcccaagatcatgggatggaggtatgtctgcggccataacagtttctgcaaatgctctcacagtttcaaccgagagtcctctatcaggcatatagcccttagagggcagaggagtaggagatctattggaaggcatgttgagtagttgaaatgccaatatgtagtataaggttgcgtcgaatcaatgctgagtgtagtatccagacaaggggtactgcttcggtaacttatagaaacgtagattatagtcagatttcagagacttcatgacatctcccttaaaaaattagttcaaaaatattgctcccaatacatgacgcagatctcagaatctttgccacaatgctaacccccttaaaagctgtactacacaccatgtaatcactgtgtacaatatcatatgcaggttcgaaatattacgttatcacattaaacgtagatgacatcaatcttcttcgaggatgttagatcgcgcaacaatgataaaagatcgatttggagatcgatctagagatcgatttagactaacgccatttttagcgtgagatatgatcaggggttgtgtgtggaggggtctatttgtcatccaattacctcttacggtgatttgctgggtttgttttgccgggtgttggacagaccacatgagctttacaaagatcataagcgctgtggacataaaatcgagtttgaaatgacttaccatcgatggcgcaagagctgcatagactgcgggtcaacaagcgatgttcgaatggatactagaaacttggtacttggactgtatcatgctatttgcacccccagttacaatcagggaactttctaggtaattctgagaggcattgggcacacgagatgccttgtgcggataaatttcccgcaaactccttaatggtggatagccacaccatggaagaagaaggctaccctgcaaaggtcagtgaacgtaattgtaagtctatcatcccctgtatgaggtgattgaagcgtttgattgtgatctactcaagccgggcgacgatctcccgtatgagcactcgtgagcgtggcccacgacagatgacttccgcatctaggccatgatcgagacaattaaccaagagcgaacaaacgagagcaatcactggtattggttgatcagcaacctggaagttgtgttgttcacggatgcagattgcacagtttcagtgcattggataacttctccactgcaaggacgacgagacaattcttcctgaaagggcttcatacatgtctttgcgtcatggtagtcgcgtaataagtatttttcatccatatttgtcaagttcgaaccagatgctaagtgtacatgtagacagccaagaaacgaacgccttgctattgatcatagagacgtcatacaataagagataggcaagtgcttgaagatcaagatcgattcaatggtcggtgtaaagctatataaagtcgaggttcagactgggaaaccatcaattcaatcaatgtgctgctattgttgatgatctttcactatgactatcgcggaccacctctacaagacagatgatgagactcctcatgctttcgcaacttgccatcaagccaaactcagtgtggacaaatctcaatcaaatgacaaagtggcaacaatactagctgcttggtctgtgctgttgcgagactactatgcaccgaacactcccactttcagttaccttcgaccgaaacacgaagggccttgtgagaagaacaaggcctcatctggagatcttcagagtcaatgcctgtcaatttcaacgaacggtgatctcagtaccagacagttgaaagatgcagcgtcacaggctattgccgccgatgattggggagacttcactaccacgaaacagaagacggctgttttggagtttcccaatgaccaaactaaaccccctctcgtggattttgagcagctcaaggtatggaaactcactggatattccaaatctccattagcgtgaatcagagctaataggtagtccaggttgaagtgctgctagtcattagtactcaacaagacagcatatcagcaaatgtgtacatcaacagctccaaaagaccagagctcaaaccatgcgccatactgaaaagcctccagattatacacaaaaccctgacgagcgagtcgtgcatcaaagttgataaaataatcaccatcaccccattcgacattgaaaggctgcacgagattaacacaatgaaacccgaacaaaatgctcgtccagaatgtctccataccctcatcactagacaatgctcccgacaaccagcaagcattgcactggaatcaaccacgcaaaagattacatacgaagaactgggaaaacaatctgctactatctggaaggttctgatgcacaaaggcatcttaccaggagaaacggttggactctgcatgaacagatcactttcaacagtcatcatcatgatcggaatattgagagcaggtgctgcgtacaatccgatagacccgtcgtctcccctggaaagaatctcccaagttatcaaaagcgccaatgttcaacatctggtgaccgatgaaatgctgcttgataggttcaaggacttcggggcaaatctgatcatcacaccgaaggattttgagaatgcagagtgcccagaagactggcaggaagacaccaacatcgatgcttcaaattcagcctatgtcatcttcacttctggcagtacgggagttccgaagggcgtcatccatggccacggatcagtctctcttagcctttcggaatgtattgaaaagctccagattgattcttctaccaggttcatgcaatccgcaagtcttgcattcgatgctagtatactggaagtttttgccccactagctgctggtggatgtctctgtatgatttcacaggaagagcgcaacgctgacctggaatcaacgatgcataagctccaagtgtcgcatgcctggctcaccccatcaatggtgccacacatccagccagagagcctcccaacccttcgaagccttggactcggaggtgaggccccaaccgctgaaattttgtcgacatggggcgagaaagtccagttgaataacatgtacggtaccaccgaatctggagtctgggatacagtgaaaactggagtaaagccgggtgacaacccgaaaaatgttggacggagcatcggcaatgttgcatgctggatcacagatccttccaatgtgcacaaattgatgcctgtcggtgcagaaggagaactgttgatacaaagtccatatctgacacttggatatctcaacgactctgatcgtcaggccaaagccttcgtgacaccctcatccctggaatgggcttccctaatgcctctaatgaaaggatcccaggtatatcgaacgggagatctggcgaaatacgatgaaaatggcgaggtgattctcttaggtcgccaaagcggctacgtcaaaatccgaggtttgcgtgtggacttgggagagattgagaatgcaataaattcatgcatcaaggttggccgctctgcggtggttctatatggacgtgaagccatggataccgaaattgtggcgttcattgaaacatgcaatgaccagaaaatccaactagctgaaacgctttctgggcagctgtctgaatttctacctcaatatatgattcccactgcttatgtgcaagtcgatacattgccgcagacgttatcgaagaagatcgaccgacagaaactccgaactcatctatcacagatgagccagaaggactttcggagatgtcgcagtggtagctcgtcggacgaagaattttccgaaatcccagaacaggagaatatggccaacgaaatcagcaatatcattgcagacataatcgagaagaaagatgaggagtttgcatcttctatccggggtcggaacttttcccttgccagagctggcctcacatccatgcaattggtgacactcctgaacgtgattcggaagcgatatgagaagaaactcaacatcgaaacattggctaaagatgtgactgtttgcaacattgcagacagtctcacgggaagaatcaatatgaaaaccaaaaacagtccccctaggaatctgattgccgatctcgcaaacttgaactcaaagcttgacttcatccagactcgcttagcgactgtctttctgacatctatcaccggatttctcggcagccagatcttgcgggctctgctggaatgtcctgaaatcggatgtgtgattggacttgttcgtgccaaggatgaaaaagaggcacgcagaaaggtccaggagtatggcgagcttggtcagtggtggcagccaagctatcaggatcgccttgaagtctggacaggagacttaagcagaccgaagcttggattggaggagaccaaatgggacagtctgttaacaacacacccaacaaaacgagtcgactgcatcatacacaatggtgctcgagtgaattggatggattgctatgaggatctcgagaaggtcaacgtccaaagcaccattgaaatcctcgccggtctttctaaaatgaattatccctgcagattgatctacgtctcgggtggatacatgccaacagagacagagagtcataccgaaatcgccagaaagctctccgaggcatcagggtatgatcagacaaagttcatgtcccagttgctgttggccgagtacaacagatacttggatcgggaaaccatcaaaagccaaaaagctcagactgtgataccaggattcattgtcgggaccaagaaagaaggaatcgcgcaaccagaggatttcttttggcgactagccttcactattacacgtctgaaagccgtcagtgacaaactcgattatctgacggttgcgggagtggatcaagtatcccgtctcattacagatgcattcttgcagccggaaagatatacctccgaagcgattcattgcaccgatggagtagaattctccacattctgcgattctctcagcaagctgacgggatgtccaatcgataggatggaacatgacaaatggatgagactactgcaagccgatgtcgaagaagcagactttgatcatccgttcaccccggtgctgaaatggtttcaggagaacacttggcagtttatggtcgcgcaagacgatatcccgaagaattgttatttcgacaagaacgaaatcgtcctggccctggagagcagcttgagatatttggtggatatcggatatttctcacacgatgaggacaaggaaaatcgattgtcgagagcccctatcttcagccgatccaggtcctgacagattcatttgatcgtagatagcactccgaattctgccttatttgggccaatttgattttttctgccatgtattctgccacgtattctgcctacttctagtttatatagtaaaaagacatgcattttgatcagaaaaaatcatgtattttgcctgattcctgtaggatataaccccttgatggatgaaatatttgatgataaagcagttgatgacgaagttactgatggtgaagtagttgaggaagttgatggtgaagtagttgaggaagttgacgataaacagttgatacaagatatggcaggtgtgacttaattttgttaggagctcatgtacgaactgcgggtacctgctgtcttggctactaactataatatgcaatttgatacaaaagcggtgtacagattagcaggtactcaaacaaattaggaaggcggtactgagcaacagggaaggtgcgagcaacaattccccggtaagacctggctcttgacaccctccaggtggccgaaagacttgctcaccagataaagggttcgacgacatggtggtttcaaaaggttgggagacgagaaagaaaagacagagcaaagaattgggcttaagttcttagatacaaacaatgatagtatttatataacagccactcccacattccccgtccccaaagatagtggctctaccacaaaatgccaccatcaagatggggaaaaaaacgagagaaaatgaaatcgagagagggttcatactcacactagtctcaacaccaatttccttatggccgtccaatagcacaaacgcaacaattatcaaaacccccaccgatgaagccacgcccccatccattcctctttgatagcaccacatttcgttaaaggtaaccgctttttgctcaaagtagtatccataacaacagatctctgattggcggatatcagcccctggaagaaaccaaggagacttataccacagacaggtgatcgggagctttcatgactgcgagccttgtcttctaaaatgtctacccacttctgcagggtaacaacctcgagaggctctgtcgagcgaagtcgctgggccagaaatggcacgaactccgtgaaaggtacatgggttgggttcacgatgtgatagtatctggattggggagcctcatgattctctccactaggagcattcgagtcacacacaaggtcggacaaagcctcagcggcaatgtcaaccggcacccaatcaatctgattcgcagagccaagactatctggaatacacccaagctctaccgagctggctaggaatgttgggaaccagtcgcgtcgtggccatggcttttctgcactctgctctttggtcggtccggaaatctgcccaaggcggcagattgtagttggtagattggtcagctcagttgctcggtcgagcagtaagcttgcaatgagtttgctttgtccataacctgtctgggcaagttctgcaaaggcgagcttggcttccggaatgggttccgacttttgccaatttttgacagtagccaccgaggagagaaagatgatctgcactttgtgcttggcatcacaggcaaatttaatcagattactgacacctttgatgtttgtctcgaaggatttgagtgggaggttgaagtttacttcccattggcaatgaaggatatccgttacgtctgccgaaagatcatgatatatgagatctggaattccaaagtgaggctctgtcagatttgcctccagctgctcacactgagcagtactgccttctcttaggactgtttgaatggttggctttgagtcgggggactttctgttgacgcaggttacctttctcacatgtttctggcgcaacagagcctccaaggtgtgtgacccaatgaaaccagttgtcccggttagaagaacatgtttactggttggcctgttccgcttggtcgttgtggcagtagtggcagttgggatttcgtgtgaatatctagacctcagatcagaatatattcccatcttgaagagaaccgcaacctgcctctgccatatttcatcaaaattttcttgatccccggactcgcgaaataatgctgaaaggcttcgcaaaatagaccttccaagaagaagtagcgttggattgccatatatggtgcctatctcgaccttccaccccacatcaatgtcatgcacaggctgagatgcaagtttgttgttgattgcagccgtgagcatctgcgcttgctttgagtccattccagcagcaaatatgtcatcatctgtacccaagtgagatgtatttggtaaaatcttcgctatgaggtgggcaagaccagaagtcagagactcttcggatgtcaaatcgaggtccaagtcatctaggttaggttgactagggatagagtgagagctatatagctcatcaatctcggtcttgtattgctcaaggcttttgttgcggtaaattgttccttttggtgttcgaacaaatggcttctctttattggcaataagaatcatggactcgtggatatgactgtcacggctgctgtttgaattttccatatccaaggcgtctttcacactattcttcaccttggatgaaagatttgagtaagagggttctgccttgtttataccttccacctcgagtattaggcccggatagcgttgcttgtttccgatcacaagagcggctttaataccgggaatacatcctaatcggctctcgataccaactggattcatcttttctccagtagagaaaacaatgatgtcgtcaatcctgaacccgtatttccacaagtctggttcagtcggatgctttttgaagacatctttggtgtgccattcgttcagctcaggaaaattgtgaaacacactttgatacgactcaagggaacggtcacgacgaatgaccatttcaaattcaggttcgtttccttctgcctctgggtctattggtcgccaatgaatgccattcaagggatggaaatgaaaataattccaatgtgacggatcattcgaatattgaatgaaagatccacattcagtggaacccagtccattgaagagttgtgtcttggtgacaaccgtgtcccctttcttttgactgatggaacctacagacatggtactgtcagctaccgttcatcccttagggtcaaaacagcctaccccctccagtgaatatccatttgaacttggatgcagagttcattgcctctagattttctgatagctcttcaacaattgacggtggaagaagagctccatctaattgagaatctctcatcgcaatttgaagcatcaatatactcggtggccggtggtagtatccaaacatcaacgtggttccggagaacagaagataggagcttagcgcgaatcccgcaacatgaaacaggggaaatgcgacatagacggttctggcatctgacattatctctagctggcacttccttcctttcgggtcttgttgagagattagtcgctgggcgtcggaagcagccaatgaagaatggctgattggcacgagtctgggtattccagttgagccggaagtatgcagaatcttgtcaaagtcagattatgtactagaactgaatcctttccacgggtcttaccactgctggagtcgagcgaagtgtggcccatgacccatcatatggatagttctttatctgcttgggtcctcgaagtagttccactaagtcctgaatttgaaaagtctgtatgcttcttgtttttgagatctcatctaccgtggaagaaaatgtcgactcaaagaccatgaccgggctattcgacagttctaggagatatcgagccattgagatgctgaccctaggagaaatcaagagggcctgatctcacttataagctttgacattacttggaagtagtgaacgcggattgcgtacctgtttccccatcttcgtggcaacgagagagatcaaaagatgtctgaggtcacttggtcctaaatagctgataacactgttagaatcgaggctatatttagattctttagaagtagcgatacgtacgcaatgactgttgagccgttgggcttgatagcgaggttatcaagttgccaggataaatagtttatcgcattgaacagaccaaggtacgaaacaataacctcatgtggctgattgggctctgcatgctctggctgaataagttgttgaatagctgtcttgtcaggactatttgaagctgttgcctcaatatagttgagcaaaattcgactacctactcgactctcaccgtgttgggtggtacattgcttatttgatgcagccatgactttgataattcacaatcagagtgagaatgataatgataaccgagttactatttggattttgtgactgacatgcttctgtttatagacacgctgctgatcaggtcacgtaatttgtattcttggaaaaagcaagacttatagccaccatgtcataagccatgtgatctttttgactcgatgtcttgtaagaaatcttacatcatttgtccaacttgatcacagactcgatcgtcgcctatctacgatggcgaacattaaattcaaatgcgcatgcgcatacgtatgaacacgaaatagtggggtttaaatatgcatcgtaaccccatgctacaaacttctatgtagtagaagtgagtcatggcgcaagtgtgtacgaggatactccgtcagactgcatctaagcttgaaccttagaaatggttccgtggctgcttctataaaagaccagtggggcttgcaagaatcctgatgatatctcttcaattattctactcacgaagaatacacacattagaacaacaacttacttttttaagatggaacacacactgtgcgtctttcgtggatctagtgacggcaagttgatccaagatgtgatcaaaagatcatttggctccaatgatgttcttcttgaaatgacacacgcaagtatatgcgggacagatgatttgtttttgcactcgccccaagtgctcggccatgagggtgtgggtgttgtcagagagaaaggccccaatgtgacgtcagtcaatgttggtgaccgtgttggcgttggttatatccagtacgtgtgtgggcaatgtgacaattgtacttcaggtaatttcttgtgttttctgtaaagcccgagaagttccgcagttgaccttgttatccaggctggaaccaatattgcttccgcagacaacgctatggggccgatgaccctcaacaaggttgtcttgggaaccaagttatttgggacgcaagtggcctcatttgcatcccggagaaatgcagctctgccaatgccgctgcactcatgtgcggtggagccactgcttggacagtcttgacacgctataatattcggcgcgagcagcgcgtgggtattattggaatcggtggcatgggccaccttgcagtaaagctatctgcagccttggggtaccatacagttgttttttctcgctcgaattccaagaggaatgattgcatggcgttcggggccaaagagttccacgttcttcccaaggatactgcggtgaaggaatggtacacgactgacactgcaaaatcattttatgggaaagtcaagcctgtggatcatttactcctgtgcagcaatacatcggaggactttgccatgctcatgaatttggtggctactcacggtactatctatcccttgacagtgagtcttgattctgttccagtgccattactggccatgatcgacaacgcaaccagcatacaaggatccctgacggcatcaacggaagacatctccagcttgttggagttttgcgctgcgaatgatattcacccgatggccgaaggccagttcctagaccaaactggtgttgaagctgcttttcatgcgttgaaggaaggatcggtgcgatacaagactgttttggagaaaaagtcagtttgctagatagcttggaactaagtatacattttattttagtctaccgtcctcgcgacccgttccgatttattacaaatttgtattttatattgccaatgaagatttcatttctcagtccgacgccgtccggtgggccgatctaaccaatctatgttgattgtttaactagtcttgcccctggaatagactctggaagtatctttcaactgaagttggtatgacttcgggaaagaggtcattgtgcagttgaccaggaggtctccaaaatctaccttgaccttgcacatatcgtaacaaaatccaaaaatcaacagggaaggtgcttcctttctgaagcttttccggcgcggacgatggattttcgagtatccttttggcctggtcgacggaagttgggttgattcgagctggctttctggagtaatgacgcagaagtcgagtgatctcgttgtaagagatataatcacttcggaatcccaagatcttattctcggatctctctggatggttgatgctggccacgaggtatttggcgacatcttcacaagaggagtagtccatttttgcgtctgggtctcccacgcactgaacctcatagccatcattcgtgatagcctgatctttttccaaccagggacaaagaattaactcgtcctgtacatcaaagagctcagcgcacccaataacggtgtaggtcatatggccactctgaattgcggggtgcttgattgcattgtcaaggcatctcatttttgcggcccagatctaatcaaaatgttagagcatgaagccagaagacgatggaacttaagagacttaccggatgtagatatgccccttcgccttcaaaccaaggtatctggtgcattccgaattcgctcggatagaatcgtcgaactcctgccattgcagccgcgtcttgaataacaccttgtttgttgataacttcacaaccaagcgtgctaacaacaacactgacatcatggctggccatgatctctgcaaggtcattgctagtgacgatgttgaggtctactctcttttcgatggtattcgcctcatcaaagtcgccgacttgaaaatcagaatttggagaaacgaaggcaaggactttcatttgtgcctctttcgactcattcagtgctttcaaaacgtgtcttccgatctggccattggctccaaacaaagcaacagtgtagaatggggtaatcatgatgaatagatcctggaggttgactttgttggccgatagaagagtgatttagtagttgatatttcggtaaggtagaggtaacagtgttgaagtacttttttgattctacttgaatagatctgaaaagggagtgtacgtgtattaggggtagtacgaacgccatgtatgtgatggtggcaaaccctcttcggacattcctgcaagtgaggcgagcccaatttcttggataatatgcattgaacggtgagaaaccgttgataccatcaaataatttgccgatctctgtcatatatttggaataccaagctctcaaatggggtatgacatactaggagctgaccttgcggcaagcgcgcactatcgacttccgaaatgatgtggagaccagcgctgtgtgcatagcaggtttctcgcctatgtatgatctatactaaatcgagaattggtatctccccctatgtctgggcgttatctgctgacgatcccgttcatagcagaatactctatctgctgaaacacttacatggttttcttttaccattgtccaatgtggtctgtgtctgggttttgagcttgcttaggtccggtatctgacggtcattgttcacatacataggattgatagggcgagggcaaaatggcaatctttgatttcgttggcaatttggctatactgttgactcgaaagactagtacataattgatttaatgagactcaatgcgcacacaagtagaaacctccaagctatcctgtctaaagttagcatattattcattcaacaacgacgatagtttactcacaggctctcctgtgggctcaaagctgtctatcagtgtgttttcatatactagatatggattaccaaaagacttgttcgccatcactttgatatcgaatgagtcctgttcctgttgcatcttgatgactttctgacttgtggtggattgtacgtattccaagtagtcgggaacaccgggagagatcacattgtcggcaatgacagtagtgccaggaccaatgagaccgagctcttcgcagagcttcaagtcattgacatactcccgcttagcatggtcaatgaagaaaccatcaacagcaccggtagagtattcttgtcgcagttttcggagagattctcgacaaggaccgacgcggatttcgacaatgtcgtccaactcggccagctcaacaagcgcactggatatagcagcaaatttagagcttgcctcaaggctcaaatactttcgaccgctggtcttctttagggcagcaccaaaaagcaaagttgagtagcccacgtagccgcctatttcgaccatgagatcaggctggagtttgggaatcaagtcttgagccacaattttccctttttcgatgccgacattcatcagaaagtcggttgttcgaccatactcatcaattgcagccaggattctctcggggtttccctgcatctcgtgatatccagcatgagcgcagataaattccagaagtcgctcttctcggccatcgtcatgctgatgagttgtcagaaagaacgtccagtcctgaagaaaatgaaaaatgagaacatacgaatataacctgctcaggcttatagaaagaaattggatcttttgtcatgatggtttgttctcaaaaattcggtttggtgtgtttgtgagataggtgaagaccggccaggcgagtcgaaggataatttgagacgtgctgcaggaattatatattgttctcctgcgagctggacactgcttactagtgacttcgatcaagtttcaattatctcacgtcatgtgttgtgacagtcttcattttcccgctctgacatcttgcccatactacttggccttgatttggtttttgtgatttgaaatttccaattgcatctgggaaacggtccttgcaagatgcaaggatagcatatcttgtggctcctcaagtacgttcatttgatggcgaggaaagtgcgcactctatcaagtccgccaatcgagatcgaggagtaaatatgttgcaaagtgcaggttccactcacacaaataagcccgatctcgggcatattcaaaaaggtttcacaacatcggcttggcacggaggtcaatatcccctccacgcatgaagactccgattcgaatcatcacaactatgtatcaagataggtagcactacgctcgggttgagcagcctgcctagcagccaacagctcgatgccgaccttccctgattttgatgatttcagccctaattaggaccagtacagactgacagaaatcgagcatttctgtgtcagtgcctaaataatgattataagaggatcattttacaatacacagtaacaccataggcgacttatattattttcagggctggactatcgaaatctgacatgccccagcatggcgtttgattggctggatcggtgaactcggatcgcgctacgcaatttcatcctctaacgacatgaagcgtgggcaaagaatctccttggcatcgaaaatattgatcgttggctttgaatcattgctgatttgctatcttcgcagcttttactagagcttcttaggttgaaccagacaacaagaatctttaaaaacttccgtggtagctattgtgattgggaaactgtctttgttctgaaaaagattatagcgttgggggccatttcaaaatacaaaaaaagactcgtgtgtgggatctagtgcatcacctggattgccttggacatcggaatggtagccctcccatcagcaatagccatgtaaatcttcgtaatgtttgttccgatcgtctccttctctcttctgctgtcatcaacaccgccccccaaaaagccagggtgatcaaccaaaccccgatgaaatggaacctgtaaagcgtgtcgtatccatatatgcatctccctcgttgctggtgccaagtatttgggggtagattgacaggccaagaactgtttgcttgtattttgatgatcttcaatcaacgtcaatgtaacatcggttgtccatttcgggattaatgcatatgaagatgggtctgtatcggtgcgagtgtaatgatcaaaaatcaaatgtgcagaatctcgtgccacctcttcacatcgactctctgtctcagattgattgtgtctatgccaggaatctgtgattcccatccatagatcatcgaatgccacagcacggtcggttttgggccagatcttcttgtgaagcgcagacagatgtggctttgctatgtcaaagaaatcctgattcaaggcacgtagatcaagtgcttggcaaaggacatagaaatgtgctgcacacatcattgtcaagatatcaaccgagttggcagtatatctagcagcaacaagagctagcgagttgactgattggttgttcatttcggcaacttgcacatggctaacaacagagttgccaaggtatgccagttccgaaagataagcagacatgttgatatcgactcctttgcaagtgaaagagaggctaggatcatcgaagcaaagattaggtggcaaacccttgttgagaattggatttataatttcctggcattgtgaggctactagtcgtccaagcatgacgatcgcagtcttggtcttttccatggcacttgacacagacgcagcctgaaagttgccaccgtggtggaaacggtctcccgctacatcgataagaggattatcggtagatgagttcagttcagtcgtcacctgtctatccgcgagcatgagatcttcaagcagaggaccaatccactgaggtgccgtacgcaatgcgtaccgatcctgtacgaggccttgctgtttgacgttcattttggtgcttaggtgagacccaatgagaaatgatcggatgttatcagccacctcaatttgtccaggatgtggccgacattgagaaatgaagtcatggtagttgtcaagtgagccttggagggcttccgtcgccatcgcggtcagtagttgcacaagaaccccaagattatgagcatcatgtagcaccagtgcggcagcggcggcgctcggagcagttccgttcattattccaagagcttcttttgcgtccattgtcacgggtgcaatatctgcctgacgcaatgcatctgcagccgacatcactgcctcgagagtctcacccttgacctgcacggatatccctgtatttccctcaaggagcccaccaacataggaaagtggagataggtcaccggacgccgaaatactgcctctcaagggaataataggcgtaattcccttgtttagcgcttggatcagcagttcgatcttgtccattcccacggcggaatgaccccggatgagcgagttacaacgcaataaaattgcgcctcgtgtcacatcctccggtaatgcgtaggccctgtcgtggctttgggggagacccggtagaattccagcctgatgatgttgcagaaatccttgttgtagtattttgagtttcttcgttcgcttgttggcatttccaccacatccagtattgactcctgcaaaaatcgataatcagtacgcattcaattgagatcccaatttatagtttaccgtagatgtcctccccattgttcaggtggatgttaagtgtgtcaatactctcctgcacacgtttctcgattgaaccagatttcgacaaagagacaatcaccgaaaatctagtaaagaaatattagacctgcaatgtgacacacatcaagctagtagatggactagtatacctggccactgcaacaagctgtgccggctccagcgagttctgatcgccactcaatattacgctttcggtttctcttgtcttctcgagaagactccaggctcgttgaacatgttccaggtgtctcatcatcgtgtactgtttcctttcgacagctagggctcatataaagttggtctcgacacaaatgatctgatgaagccttggtggtttttgaattgcaagataggccagacttttcactccttatgtagattgccattccgcgctaaggggaccgcgatggagcctaactgatccacatgcctcaatgggcttgtttcacaagtcacgtatagtatcatcataatgccatcatcatgcgagggggcttgttgggttcttgcagtctcatgacttgggctctgcctgcagcttgcataatgatgtggcaatgagatatcgagtttagattccaactatttcaggatttacacagctgattaatatactaaatttatatgtcctcgagatatatatacctacatatctacttgaaacacgattgcagtaccctctaatctagtgatactcaagtccaatctcaatatgacacagaatacactaagcaccgatgttctcattatcggcgctggtcctgcagggtatgctttgttgtccaagaaacaaaagtcctactgaccatccaccctaggctcatggccggtacatggatggcacaaacaggaataaaggcaatgatcattgataaaatgccatgcagaactcagcgtgggcatgcagacggtattgaaagtcgaaccttcgagatacttgatagttttgggatggcagatagcatatggaaacatgccaaccgcacaatcgacctatctatttgggtaagtactggatctaatcatttcttgttttattatatagatatctcctatccttaccctagcttagtagatgagatttattcgctttttctgattattgactgactgtgcgagaatagaatgactgtgaatctgatggaattcagcggcaatgtatctcaaataactgtactccaggcctctctagatttcaagaagcaacattgggccaaggtcagatcgaagaaaatttcattgactttattcaagagtcgagctcggttgaagtgaagtggaactcatatccagtcgatttgaatatgtgcgaggggtcagattatcctgttcgagtgactgttgagatgagaacatctgaaagggaggtacgccaaattgaactacccatatattggccctcctatcaactttttttctaatgagaaattagcagacatcttatactgtcaattcaaagtaccttattgcgtgcgatggagcgcacagctggattagaacggctcttgggctcaaacttgagggtgaccaaacggatgaaaagtggggagtgattgatttgatacctctcacggactttcgtaagctttgaaatctctcttacaaatacagtataaggaacacttgctgataaaccctcagctgacatccgcaagcgatgcattgtgaagtctgattatagccagttaatgataatcccacgggagcgaaggcttgttcgatgttacgtccaattgccacatgaagtagctgcagtgctctggaaggaagtggatcctgcgttactggtaaacattgtgaagaagattttaagccctcacaccttcgaggcctcgaatattgaatggtcaaccatctacactgtgcgtaaatccacaaacactacatgcggtgattatttctaacttttactgttctcctaggttgggcagagactgtgtaccactctttcgatgtacaaccgagttttcttagctggtgatgccatacatacccattcaccgaaagcgggccagggcatgaatgtcagcattcaagacacgtacaacctgggctggaagctagcatccgtcatcaaagggaaggccaagtccagcattctacacacatatcaaaccgaacgccttcaaatagcaattcggctaattgaattcgacaagaggatggtccagggagtctttcagatggactcggcctcttctgtggagaatgcctcatcgatgagcaaccagatgcaagacactcttgaggaagagaatggatccgcatcaggagtcactgccctctataaacctagctgcttgatcacacgatcgtgggattcgaagggtcaccagttggttcgtcctttgctgccctatagcaagattgagctagccgggaaattggctgttggtgccagactgcccaatactcaagtcttgtttcaatgcgattccaggccttggtctctacaaagggttcttcgcagcactggagagtggcacctttttatttttggtggtgacgtctcgatcaacacacaaatgacacgcgtcaaacgactagcatctgagctttcccgagatgagaccttggtcaacagaatcaatcaacgagaccatgattgtgtcggcaaaatctcaacgtacctagttcactgtgcacctcggaaaagcgtcgacttaatggaattgccaaaactattcataccattcgatgaaaatttgggttatgactactggcgcgtgttcgctgacgaggaactgtactccgaaaagcgaggtagggcatatcaacaatatggaatcggggcggagggatgtaccgtgctggttcggcccgatcaacacgtcgctttgatcgggactctggatgatttcgccgcgattgagctatttttgggtaatttcatgactctagtgtagatactaattcttctcatacacattcgagcttttttgcgacaaataaaccaatgataaagtggtagctgcggtctgaggatggttcaggttgtcctgaatcttagattcgcaatattcacatgggattggacctcgaaactccatgttcattctgttcatctttcgtctcacattccaaggtttagggttgtacctacacgttagctaatcttactgctatacctaggtagacccgcagactcatagaatcaagatcaacaggaagaccagggcgagatgaaccttcggggatctagctttatggcaccgaatttcataccggcgaaataattcctccgagcacagtcatacacagtattaacgtcttcagctcttttaggatgtaatttactgcgatcaccgcccccgagcagcgaaatcgaggatcatgaggactctatggtacaaatcaaagagtgcatcagtcaagcctcctcggaaactcagcgttactaatattgagacatgttgccagctgcatgctccatgcttgtggtcggcgccatgttgcctttcaaatttaccacatcgtcactgcagttcaacacggcgtattgaggcaggtatgcaactcatggaggccggttgtgtatagtagcgaagacaggcggtatttttcttcggaagacaaccacgaaatattgaagatccgagatgctgatctgcaacgaatgggaggtaaaagaggctattggctagtcgaaaatcctgagcatggtgatgttgtgtcccggatccgatcagaatttatggatatcctgagcgtactctgtcaccggaatcaggaagtagtagtaggtgctcaaccaagttgggaaggcgtggaagttgctatccaggagtgcgagcaacaattccctaaatataagactcagatatatcttctctcattatacaactatgaccagttggacaaagggcgcataagagcctgcacacctcacgtcatcagtaattcagtcttgaaatgtttctcaagggtagtgaggctaagcactcctggccttgcatttggtgtgagcgtattatatgatgattcgtcaagcaaggtgggtgaaatgaggggtctcacctatattgtatacatatggtatgtgtgtagcctgccgatctcttctattctccatggtaacaaacgaattctcattggcacacttgtcgataaaatgggtagtatcgtagccccagcttctggtttacttaatccttgatttggacatatacttagcaaggcgaggtagcttcactatggagaggtatatgaatcgtcaaatattgtgagaaccaaaccaagtctaggctaatgaactatctagcttcaggttttacacagctcctcttatgcctcatgccaggcgtagtctcgactctccacgtggcacctcacgaatcttgtcttatattaattataatttgggattaattcgggtatgagaagggcaaaagggaaccttttgacccggatttccttgtttagtagatcatagcttcacctgataagagttcttcctcctcatcaccttgctgagctggagacatgtctcgatttcccgaattcaacaatgtaaagtacaaccgtggagactgcaaccttgtagaaatgctcgtataatcgaggaagaaacgcggcaatccaatatcatcggtctatcatacagaagtgcaagcgctagtgaacgacaatctcatttgaaagatggtaatcgtcagagagcagcgaaaaagcaagtgacagcgtaagcgacagtcaagagagtaatggtaacataaagcaatacaatgattagatgtatgagacaataggaatagaaaagcaaaatgaacaagcacgcataactaaataaatcctaaccagacaccagcatcaggagtctccctaaaacaaacccagaacctttcccgaacccatccatacccaagacaatccctagtccaaccctctatctattccatggatgcagttcctcatctgatcgtgtctcggtagtgtcacccgcaagcatttaacaaaagaaaatggggttgcaagggcaagatgacatcttgaaacaaaacaataaatcgcagatttgaaacacgatcagaccgtccgactccttccagtgcgctggttcccatcaatataaatacaaacggaataagaaaatgcatgaaaaacaaaggaaaataagaaatcaatcgagaggcatagatgtattctctcgtgggaatcaagggcttatgcaatgaggttattaaacaaaggaaataacggaaaattcaagctgttgcgagacacttgtgtcggttgtgaatcgcatcatacagcagtagaccatgtgtggtcacctcgaggtttcatttcgtagttctccggctcggtgctggtaggccgacgaatggtagagttgggaaaatacatgtgcggcggcattgatgtcggatacgcggggccagtgggctcagggtaagtgaagtcgttggctgacccgggcgatggcatgccaccgtgagaaggcgaggcccatccaagactagtcatgtgcggactgccattcacgctattaggacggtgatcactgttggctggaggctcaagaggttgaggcagaccgtagggatgcgatgtcatggatggccggttgtggggcgcactgccgtagctggacagcgaaggagatgtcgcagtcggggaagctcgggggctcccttgggggaaatccccacgcacatgaggcgggatagggccgttgcccatgtagtagtcgccggcagagcggtgcatgttcagcggcgggagctcaccaccaggtgacatggacgggtgatgcgcgggtgacggggtagaatggatggaagcgtgctcggaaaacattccttcgccaggacgtccacggtccttattttgtcgcaattgggcctctgtctcagcagcagcttcttcgatagtcccggtgtggtgattttggtggcgtgtcaacgtcgtgcggcgcgtgaaggtcttctgacagttggcatacgggcatttgtagggtcgcttgccagagtgaatgcggcgatgtctggccagcgaagatgagtcgctgaagggctgaatcaatgttagatttagccagaacaaaaagaggaaagttacacaccttgccacatctctcacacatgtggggtttctctccggtgtgtacacgggagtgcactgtcaaggccgagcgttgaatgaactgctttccacaccctggccactcgcaagcgtgaggtctaactcctgtatgaatacgctctgtgaatcattagcggccgcatctccaaagtttccgaaggatacataccatgtcgagcaaggtcgctacgccgtgcgaagcccttgttgcaggttgagcagtggaaagtctttggtggtgggtcaatacctgctcttccttgtggagcaggttcctgctgcatctggggatcgccagcgtatcccgcaggggcataggccatgtttcgaggggttgaacccgtaggctgtgcataatagaaggaatcgggaagtccaccatccatttgcatgggcgggggaccgtgaggaggatatacattgacgggattttccgggccacctgattcgctcttcatggtgggtgaagctccggtgtgcaactgggcactatgttggaagtactgctgttgtaactgcgcctcagcggcggcggcggctgcagcggagtttttcctgttcaggatggtcgtgaagtccatgacccgacccagcaagtagccaagggaccgcggtcaaggactgctttcgaagacgtccttcggcagaccttccacgcgactagtattccgatgaagtccgatagcttattggattcggagtccttgacgcgttaggacgtaaatgaacagtggaggccgttgggtgggagattcgggtcacaactagcaagctctgcaagtcacggtataattagaaccaatcttcggtacagtagatcgagctcgattctgcagaaactccgcgagtgcgcagctcgtgggaagaccttagaccagaaactcaccctgcgtagacctgtatcgtcttggacagtccctcggcgaagaatgcgacggggtaaattctccacttttctgcagtggaatgcaaggttgcgtaagaggtatcgaacgatgggctttctgccaaaaaaagccaagctcgtctcagagaataatgttgtggtcggctcaaggcggaacgcgtggtcgtttgtcggtgaaggtggaggaagataggtcaactatccctgtggaggttcctatgcaacacaagaaatgtcgatggtcagcatgaaactaatatcaagacgatggttgcgatgccgagtattttccaccgccgtgctgtaagctgattttctcgcctatgctccgcggtcctcggtacgggagaccagtcacaacgccgagttccaggaaaacgaaaaaagaccagaccagcacgtatggggaaattgtccgtgttcacgaaacccaagataacagcgcatggcggagagagttgggcagccaaggcgaacaggcgggatgcgtcatcactggcaaatcgcggtgaaggcaaggagtgaagcgggaaacacacctttttcaacgaagcttgaggtttcaagatactagaatagagaagagtcgagggcgacacaaagagtggctcgagagaatttaggaatttgcggccgggtcaagtggggttaagaaggtagagagacaaagagatcaagaagattggagatgaaatgaaagaagaagaaagggaagcgaagggttaaaaagtagaagatgagaaagggggggggggaggagaaataggaaatattatgattattacatgtttaggtgatttaggtgtggtaggtgccactgtctcttgcatctttgtacatcatttatttacacttggagaacttatttttggcgctctcgtagtatttgtgtattatcttcgtgtcttattatcccggtttcaaatcggacttctgatcctatatggcgtttccatctacatcccacggttgtgctgctatatcagttgcaatccattcagacctctcctaagctgaattccctttctagaaggactagtcttcctagtcggacccagcgaagcccgctagaaggaaacctgaccgcaccagaaggatccacaacgtgcccttctccccgtgtggaaatggatccaaaaggccgatccgaacctgagtttccttgtgattattattatccgcctcgatatagcctcctgaaatttaatctctaaatataccctggagggtggtgtttattcccaggccatggctcaaattaagcataggatcgggctaataaggaaccagatcccaatgttgtaatatacggtgtagcaatgcgttaatagagtcccatatacagtatgaaagggggggggaggggccgaactacaactgacaacccctgaagcgaaatagaaaatacacgcatttctcatccggattttacgattacgataaaaacacaaagaataaaaaagaaaaaggaaggaagggaaaaggcaaaaaggaaaagaaacaggagacatcgatcaacgatgacatgcaagtttctcatggtgcgacacattgagtgatatacttatttttatacgatgcgaaggagattacctcgataatctacccggctgttagccggaaacatcgcaaaatcgagattgaccttctagaacagttccgctatcacaatggtaaccattcctgtacgtacctcacgccgcatatatgggttacacggttggtaggaccaactgacttcgacctgctgttcttctctctgtttcccctcttcttttcttaggtacgcggactctgacgatcctgcagtggagctaatccggtctgcatcggtaattactcaacccctttcccttccggggcctggcttcagcctctgggaatccactccactgccacaaaaagacccgtggacggcacggatggctctgccaagccttctcctgaccttccagaaggacgccagaagcattttggaacatccgtagaagccgtggaagccgtagaaggaaaaaaaaaaagacatgcgcggcgccccgtcctgcgcacggttcggagccttaccaggagatcatccctggctgtgcactatacccttcacatcgaagaattaatgtacgaaaaaaattaaacagagccatgtatctgcctagaggcaaaacaaaatgaaacttgaaaaaaaagggggggttgggcaccaggatgactggtccagtcatatcttgccaggtgacttttcagggctattcctcttcattggcatgatcgtctatcctcttacgctccctctcacacacacacacacctaccattatgtgcccctcgccgggctaatgcacaccctaataactgtgacgaaagtgacggcacatcctgcatatgcacttgcgcttgccgggtttggtctcaacccgggtgctgcggggagttgcggagattatctcccctctacatacaattgctttgtaaataccatgcagatccgtgtaagccgaataaaggtgctggaatctcaggatctgatgaaccaatgactggcaagatgatttattatagttcgccgttgacttccttgattttacgcaatcgccaataaacagaaaatcgaaccaaggcgggtcaggccgacgcacattggatggctggacacggggcgattcccacatggttgtggctgagacgtgtcttggtgtatcgtgtccgcgctagtctccatatttctattagtagaacatttcctcagtttgtatgcccctaggatggagcatgtcttgtacagatcattttggtgtgctttatagctgcctctgacaaattaggtagcatttctaacttccaaggtttacccgggctcctagtgggtgactaggtctatgcatatgcatatcgacctcggaagatcaggcatgccctatttgttgtacgaccgacgtaacccaaaaaaacaaaaccaaacatccacaaaatccaggaacagccgctaacgctatgaccaaaaggcccatttttctgtctcttgtgtcgcagattccactctgatgtcacctttctcccggggaaattgagcactggcccactgatgtgcctttctcatcccgctaaggtaaatagtcacagataagtcaacgctagctcgtctcagcctgctgtgggagtttgactgaaaatcccggtaacacccaaatcctccgtactagagtggcgtgggagctaatgcagatgacattaaagcattgcgttgccccatgctccactaggaggcgactcggtataaaggaaatagcactccgcgcggagtatgttgtagatggatacgggcgacgtggactaaaacaacacgtccttgaatctccatctcttgttctagtctcggctgccttccggggactcaaaattgcgatttggctctgtttgatggatttgattcggatggttactatcaatattagactctgttactctgtatttaccaatgcattcaccaaatcatttcaattatcacgtggtgacatgcatattctagtagagttgattactccgtagttagtataccacagtttcatatttaatcgttcaatagtcatctccaactacgtctctaagaaaggcttcactggaatctctacttatttcattcacactatagtggcgggaataagaatcaattatttaaacgtggaggttcagatatatattttaggagaatgtagtactgtagttcgtcgagctaaacgttcagataatgaaggcctactgactacaagggtgccaggagccttgctaaggaggatttttagagactgtggctacaataatatgacagtacacgttgagaaatggactctactggcgatgttgtatgtactagtccaagtgggttttatggaacccgagaatatttccgctgccgaaactacaaaagtccccaaggtgggattagctcccctcacagggatccaaagccgcgactaattaggaagtggtatgatgatcatgttgaccgcttttagagtgggtgggctaatcccacatacaacatacaacttacaccggagtttaggcccagatggctttgtttttccgcttcggtgctcaccccgcgccgctttttgcctaatgagtaatgtagactgagcacgcccctgagtattacataatcatcaaactcccgaggtcgcccacctcgcatcacctggtagttacataagctcacaccacgcttcgggttgatatgaaccttccaatctttgtctctctgctccttggctgtcctaacggacgggcctcggttcaatttggagggctgccgctgtatccggttcatgcagaagtagataagatcgatggtcttcacggttgcatattcttcaggcccttgttcttcgataccaaagagcagggttgtcaaagttgtccttggactctagcagtcgacccataatctgaataccacagactgtttcttcagaattgtctcttcggtcgcagcagtaggtagagcatttgcatcaatcttaatattgcgtgtgaagttcagacaccctaaagctcatggatttagggatttagggaagtggggccccatatatcttagatctccgcttcttaaaacctcgcctgtaataatactccgtacggagtagatcaaaccgaattgagaagtgtagagaagttgcttatattctgtgctatcattggcgggggtatcaatattctactataaattaaccacccttcttttcctaaaattccattaaatgcggcgcttttattgagcgcatgaatctaaatctggttacagcacgattaaatgttgtaatatgacgttaaaacagaataaatactaagcttaggaagaaagccggaggacttgaacaaccatggctggctatgtccttgtcagaaaagtggccggataatctgggttcgactagggcttttgtatgaagaagtctatggtgtgcctacgtataagagtgctgaataatataagattaatggtaactagctagttaatttttcccacgcttagtctatagtctattaacattgttcaaccggttgttcgcatttgctcttttacacacaaaatgctctaaaatctcagacatgactagatatcaaattgttaggccagaccgttgaatgaatgtgaagaataattgcttgcctagaattaattgaccagggtaattacaccgtcggattaccacttccatttctaaaccagccggcatctactgtccgcaatgcttacatttccgctttctgccctttgaattgtctcggatatccgaatacagcaatggtcgaagagaataatagattgattagttcattatctggagtagcttcttattagcacaaagaagaagcagggtgttcattggatattattagccaaatagcaatctccaccccaaatcacgcgtatttccttatacccaggcactcccaattctactgcaaggattattctacataatggtttattcagccttgcgatagccttcctaccacctcagcctgcacctatcactaagaatggagaccaagtgcgggataacgggatcgttaatctagtcagggttttgagtaaacagacttgagcttgaatattggtgacaccctggtttaaggtacggtgcgcacttagccatcttttcagttcgcaataatcggcttagtctccctggaaaaaggctagttggtcatcaaggcgctcaggcatctctatatctctataagaacaagctgcggccacggtatcctgaagcgtctttcccatttcggtgaggtctgcccttcctttcttaatactactcctaaagcttagacagggctttcgagtctaggattcgtgtctatatccagggtttatagcgttgaagggccttcatcgcagaaagagacccaattgcatacattggtgtaaatatcccgcgtcctgtttccctggacgacactgtctaattatgttagccaaatcgactactccgagcgcaatatatgactctcgtaccccacacggcgagccatcgccttgcacgaaccgagaatctgtgcttaaagccatatcgagcgacactaaacaaccatcgattcgcaggtaacaattgttttcaagagcccacagaactgcacgacgaacaggaatttgtctgctagctgggatgggagtagattccctaacggtgcgatattccgctgggagtttagtctctccatcaactggtcgccgcaaatctaagggcaaataaaatactattgcgccggtggtaaagtttctcgtagagtcttttagtatccatataactactcgatacccttaaccctaactgtggcattgcacaccttctgattgatgcacactaataccaacttgggttatttttaccatgtgaaactggtaagctagcagagatgactttcatcatctgaaagtggtggtgatttcctgacttcaactttcagtgtttcatcaaatgaagatatagacgctcgttagacaatatgtctattattgcccttcttttgtacttccccgcattatctgacagttccatgcttttatttcaaccagcaacgggcaccgtcacacacaggttataaagtttggttacatagacttaaatgaccgaatggtatctatgatcgatactccctacagagtatcgtatatatatacctccgttataaaaaaaaaaaaaaaaaccgacaaaaaatagatgaaatagagtagcaaaagcatagaaaggatagaaagaaattgaccctcgactttggcgtcaccgcaccacactctaaccaaatgagttatggaaccaagttcatgtcattattccgaattttaagcccctaatctgatcacatttccagtactccataaaaaaagaaattctacttctgtcaattgtagatggcatgccaaacgtctctattaggtagtagtctccgttctccacctccctaaagatcaacttgctccggatcaacgtggtcctaactgctaactgcttactccacttgggctcacatccgttgtattggatcgacattcaacgccgatcgatcttcaggggttccatgggatcttcgctgggtcacggcattccctatgccgtactttgtaaatattgtctctagtcctgccaagaccaagcagcctgtagtcgagaacatcgttcctcggaactatcctcagtagctacaatcgtgaagcataagaggtaatccaaacatccatatcacattattcaactcatcagagtagacagaaggtgtatctatcgtctataaataacgaaacaaaactccatgcatagtggcattcctttgcccatgcgcccatgtgcctgaaagtgggcttattgacatagcagaccgcccgtggcccggagaccgtataaagaagcccgtacacattgtgtacatgtacaaggcaaaacaaaaacaaaaacaagaatatttatctcttgcgccacgacagctccaagatttgatcaccgttcttctcatcgcgcatgacataccactgagtgacactatcattctgctcgtggacggcatcctgcaaccggaagctctttttgagctcatccttgcgtcggagcggacccaattcgtgcaggtaagattcgtcattggcgccattgtgggggtcccaggtctgctccatggcgaggtcgttccgatctgggtcggagtgatacttgatgaccgagaacccgtttgtcaggatccagccgtcgccaaagtgccatttgcggagaaggcagctgtcgccgcatagctcggcgatcaccgctagcttcggcatgtcggcgtggaaccaggatttccagtggtgcaccgtgagtgggggctcgcggccggactcgaaaaatccagaggcgtcgtgcatcaggtccaattgccgcagacggtgatccaccgtcaaccgggtctgggtgtagcggtagacgcagatggcgatgcggcggtcgcctgtgaaatccatcgcagagcacttatcgtacacgttggtcatttcttctaagaggggtttggataagaaaacgcccgcgcctccgaacccaatcattccgaatgctgcaatctgcgggatagactcggataatccgccaatatacatggaggtagtgtggtcatatttagcgagcgcatccaccagtctcgacatcgacaggaagaatgtgtcgtcgtcgatgatacagccccaccgggttgtttcccgagcattctccttcaaaagagggatgagtgcgaagtatcggttgaggtagtcatcctccgcctctgtgatgtggaggttgatccctagagagtcggccttggccaagacatcccgcacgccgttttccgagcgatccggttcgatcagtgcgaaaatgcgacagcgcgagtatccagcccagtgagcgaatgcattcagagactcattcaatcgctcgatactggtcgcgactccaaaatcgatgtgcgatgcgtccgccaatttcggaggctgggggacctgcaaggacactggtgtgggaattgagcacccgtctgccgcctccccggtagcccttcgcacttccaagaacggctcttcaagccattgcgtgtagggcactggttcgtctgtcatatcgagtatgatttctcggcgggtatattgggcgacgttgataacgttcaggcttgccaatttatcgtagtcgagatcgcacgggacattgggagcgacggtgatgttggcagctgtctctagcggaatcttcactggctcgaccgagggccatagtacagcggcaaatcctaccacaaacaagaagataactccaaatcgcagcacctttttccaagcccatgatcccggaagatacccatctcgagcaccgaatagcatgttttgtgttgtgagattgtgtcgggttctaccgcattgcggagacaattattttggtctagaacagggcccacggtcgcaggcggatgaagtataatataaatatgtccaggcggtatggcgagagatggagaagaggaagaggcagagaaagaggaagggaaaaaggcagaggaggaacaggaacaggaacaggaacaggaacaggaagaacgtgagactgaaagaacgggaagacaagggtcaagaaagggtctgagacacgatcgatgacgttcaaggtctatttggcggaagtcacgtgtgctcgtatagtacatcgtaacttggagattatatcccggtccgagctggggaaaagacagtataaagatgccagcatggctctattgaaattcctccgtttccatatatactactccgtgctgtcttccttggtggtttgctaatttccgaagtgtacaaagtgcagagcacagccgtgctgatgccaagactttctgaggaatgatcccttcttttcactcgtcggcgatttctccggtccccacatccgcgcgtcctctacccgtgtgctacagagtactccgtccaggctttgatagccaaggcactacggagtgtttggccctagataagcactacgatggagtacaacggagtactttccggacggccattgtggtactcgataacaattggcatttgcgatataaacatttagaccctccggcgcagtggttcacccacccagccccactttgaagatgatattcatgcctcttactggaagttactcgaaaagctttggttgcaaatatgtacggagtcctccgtactgcacatcatatggtatcgaaccgacccagctaccgataccaatgccaatgccaatgctaatacggagtagatccgaaaagaaaacctagtttgccttgcgcattgttttcttggttctctccggatttcgccctcggcattatgttcccgaatatgcatagatggtggtcagcgtagaggagacattgcgcttcaatcagctagcggcttactggtcgctcagacagtctcctttcaacgtcgctatccctaggtattacacccaatcgaaaaaagtgatcaacagacttagagtctgtccacgcgcaaaagcccactgcaacctctacactagatgatatatcttcgcaagaacatatgtgcatttaccattagaagagcaggcagacgaataataggaggagagaccaagttgtagcttaaagcttcacactacgtagtaagtctgggtgacgatgaaaaggaagttaggtttagtacctacagcaagagtccccccccggtctaaaccctcgtgaaattgaagtacgggaaattagttcaaattttgtccatatcaagcttactctgcaagaattggcttatatgcagttttgcctcagtacacactctacaaacgccagtgcttcgagatctgtcaccgttcctcgtggatttgtcgatgtcaaattggagaatcatataggacacgtgagctacggcggggcacatatcgttgagcgcagaaaccccccaatggggaaaagaccagttccgcacattggagtttgatatcagttgatctggggaaattggccactgtgttctttgtattaatcacgcgtttttgatcttttatccgacattgaagttaccgtcttcttcgcccgcaaattatcccctaaaattctcgacccccgccatggttgcgcaatcgctggcttcgctattacagcaagcgtcgattgatgaccacgaggaagtccttcagtcatgcaatgcagtcctcgccaaatccaaatccgacctgcaagcgcagcacatgaaagtcgttgctctgttgaaactcgaccgttatgaagaagccctcaagacgttccaggccggaggcgatgcgctgaagcagagtgcaggtctggaatacgcctatgcatcatacaagtgcgggaagctcgaagaagccacagaagccttgagtcgcacagcttctgggcgtggtgctagccatctcgaggcgcaagtggtaggatgccccatctgtccttctgttgcttgaggaccaatgttgattgtcgtgtcataatagcgttatcgtactgaacacttccgacggtcagccgagatctatgaacaactctcaaaagatacgacagctttcgggcgcgaggttaacgacctgaacatcaattcgtgggctaccgatgcccagcttcaatggaaaggagagacggaattcgtgcgccacgaccgattgtcgagggaggatttggaatcattcgaaacaacctacaacgcagcttgcttgaacattgcaaagggagcgtttaagcagagcgaggtcttgctcaaccgagctcaaagtcagcatctctccgtcttgcctaagactaagactcagactgacgttttgcatagatatctgccggacatcggaggacctttcacctgaggacaaggccgcagagctgctgccaatcgcagtgcaacaactctatgtcctgattcaacttggaaagttggaagaggccgaggcggttctcaaagatatccccgtggaaaagtacgtttaatcgtacctgctcgaaacctattgctcacatcctttcctagcatcaccgagctatcaactaagaagattgcccgtaacaacatcgtcctcgctcgcccgactgccgtcaatccctacatcctatacaaggccctccacgacaccccagatgccaccaataacgatcggctattcgaataccaggaccgtgatgtgattggaaattcgcatgccgcagacctccttgttcaaaaatacgatggtataatccggtctacagctaaggcacagtcaaaacgcccaagtccatccaccgacgccatcaccaaccttctctctgtattcaacgccgcagcacatgctcaaggcgaaaccggccctaaagcccttaaacagatcctcccattgctggagcgacggcccacagacatcggccttcttctgacagtggtacagctctatgtcagcggcggcaacaccacctctgctatcacagccatggagcaaaccctcggcagtcttgagggcccaaacgagtccgtccgctttaacccaggcctactcagcgtccttgtctccctgtaccagcgcgaaggccgcatagtccagatccgcactaccctcgcacaagccgcctcctactggcgcactaagcccgagccccccgtgtccctcctccgtgcagcagccgcctcccttttgcactccgaagaccgcacagacctagctacagcgggtgatatattccgtggtctgcaccagcaagaccccaatgaccgcgtcgccatcgccggctatgtcgcctcacaagcaaccctggactatgcgcagattgagtccgagctcgaccgcctgccggccgtcaacgacctgatcgccgacatcgacgtctcagctctggaatctgctggcatcgctccctccgcatcctcggttgccgcggccgctgctgcctttgctggtgcccgcaagcgcaccgctgctggtgccgatgagcgcgccaacaagcgtgtccgcaagtcccgcctacccaaggacttcgatcctgccaagaagcctgatcccgagcgctggctgcctgtgcgggaccgctcttcttacaggcctaagggtaagaagggtaagcagcgtgctgcagcactcacgcagggtggtcccgtcaatgagaaggcggaagagtctcccgcccagcaaccgcaaaagaccggcggaggcggtggtggtcctaatgctaagaagaataagaaaaagggcaagcgatagtgtaatttcagatagaaatcatagctcgaatgctacctacgatacatggaacacaggtatgtatcttgtatttcatattgaagggcgcctcaaacccgagacgggtagtagaatgaattcccactggctttgtttagcccccaagactccaatctttgcgataaccgaatgtaagcaattcctgtataaccaagcctaaagcaaattttcgagaaaacaccggacgaaggccctctctaccacatcaaaccgtctgttgagcaatcaacgctcaacccagcggagtccgaatggtaccacactggcggttgtagtggtcaaagatcatgagcagcagccgcagatccatgactgcgtcatcagcggttgtcttcgccgccgacccatcaccagccaaataagaatgcagagccatgaattcacgctcatacgcctcatcacaggtactaacagtctccgtccgcttcacacgaggacgaggaacagcattctcggtctcgttaatctgatttccattgacattattcgtatcctccgtcccgtccgcttcctcaacgacaacccgcacataggtaccagtactgattttctcaccaggacgcgggaagtcgtactccacactgagagtcttgtgcgcgccatagagagtcaaatgagcatcgcagcgaggcacggcatcaaccccagcctcatagagaagcgtaaacgggcgaccttcattctcggcggaattcgtatagtgaaaaatggcagaataaaacgggtccgtgatagcgacgttagcaacagcatccgggaagcctagcgactcgcgcatcagcgatagatcatgacaaccctgcatgccgaggtagcgacagaaagcgactctgtccggtgtaaggtcttctttcaacccgaagacatcttccaacagcgcgtggaactgctctgggttattattgcgcttcattgccggcgtgatatctttcgaggccggcgcgacgatgttgttcatcggaccggcgatgtgtcgacatcgcgcgtagtacacgcggcctaaggaggcgagttccttcttgaagacatccgtgaagcagggggcgtagcggcgcgcgcatccgatgaatacctttgggccgtctgtttcgttggtgccgtcaagggatcgggaggccttgccttttttgattgcttcgcggatgcggcgcaggcttgagacgctcattgagagagggacttcaaccattacgtgtttgccggcttcgagggctgtcacggtgtattgctcgtggtattccattgggaggaggttgaggataacgtccacttctttatggcgcagaacatcttcgacgactgttgtgctgtaggtgatgtcgaagcgggattggcattggttcacgacttcagcgttggggtcgtatatggctgtgagggtgtagtgtgttttgagggaacagaggactgggaggtaggtggcttgcacggcgttcgtggcgcctaggatacctaggcggaggatgggggtggacatgttggcggaagggtaggaagctgcggatctgatgggtacatatggagggaagccgagagacgattgagttctttgtagttcgtctcagctaaatgactgagaaggagaatggtatctcaagtagttgagggattaagggagtttcgaatgtgaaagtgagcaaagctctaaaattagagtaagagcgatgcctcgttgatacgatctcggaacgatcaaacaaagaaaatacggcagtgcccctgtgagctgtgtaccatcggcttcaaggacaggacatccctggagcatgccaactttgtgacatcattgtcctgtgatctagggccacatttcatagtttggtctgagttttaccccggattcgaaccatggctggtaaaatccgatacacttcatacagacagccgcagattatctgtcgatcctatatagatatggatggtccatgctatgtgtacgaccgatattggttggaaatgaaaggcatcatagatagtgacaaagaattatactcccgaagtagactcatcttagaataaccgacctttggctatcatacctctgtaggccttttgagcgatctttgcaagaatacacatgcaaggatgtcagaacaagaataagaattatccacccgacgtacggcagtggcagctctaaccgctagtgcgtcatattagattttgcctgcaggcggtcaaacttgactatagagcgctgcacttctgtggcgtctagtggtactagtaggggttagagactgctgtaacccgacggcttccaatattcttgaaagtggagaagtgttgcagtaaactgaatgaggatgaaccatgttgtatagcgtcacttatcaatctccgagtactccgtacggaaggccaggtcccggatggccgaatactcttccgttgccggccggtacttcaatttccgatccgttcaaactcataggaaaagattaaaaggcctagaaaagttttttatcccgttcaaagttcttggggcgcaaggacaggggaagaagggtgaattccctactagcaaatatattttatacgagtaattcttcattgctgtgaggatccgacttgcctgattccctatccgcacatttgagaacgcagccttgttagaattgtactcgttttcttgaatcgaactggcaagtcacagttgctacagacatgtctgactttgcagagagcccatcaaatctacccctggtagggaagtctgccatcgttactggggctacccgtgggatagggcaggaaattgcccgacagcttgccattctcggggcgaatgttgctttggtttacgtttcaagtaattccaaatcaacagcactcgaaatgatcgacgagtttacaaaccaaggtcggaaatgctgcgcaattcaagccgatctatcatcgggaacctgtggagaatcaattgtcagacaggctcttcaaggccttggggttgggaccatcgaactcttgatcaacaatgcggccattgctcaaacacccgccagcgttgaagaaccgttggatcaagatgaatttgagaggtaagcctttcctgttcacggccttcgtggggatctaaagattgctaataagactaggatcatgcacatcaacgtacgagctcctatccttttggtccaggcattgcttccgcacctaggaccgcatgggaatagaatcatcaacatgtaagtagtttcgacctaattaccttcacaccagcattgaccattaacattcgttgcagttcctcaattggttctaggctgaattttccaggatatggtgtttattcagcaagcaaggccgctttggagtctttgactcgtacatgggctcgagaacttgccgtcaagaatcatctcacttgtaatgccgttttggtaggacccacagcgacacctgacgctcccgacagtgatgcgagggccgctgccaagggtcttgctaccgccgagcggagactcggaacaccgagagatgttgcggatgtggtcgcctggctttcgggagaaggttctaggtgggtgaatggggatttgattggatctaacgggggggcttttatgtcatgattgaatggcccatagttatccgttgaatttacataactcacattacattcgagaacagcggcaatagtaaaaaatattaattaagctgtgttatagtaaacagtttagtgactctgcggagagaccacgactgaggttcaactgttactcggacatagcggggttggactaccgaccggggtaatacgaatctccgtcatctgcctcgcagaaatcgtgggatcggccctcgtaaagaggcgcaggggaaatggttgccgcctaaaatccgtaatatatatagggctgcgtatacatcaatttaatgacttcatgtgagatacttacggatacttcattcgcgagtaaaaacacgtgggaacaaagtatcccgaagtaccttgcgtataccctcactccaactgaagaggggccgctatccacatcaggcaacgtcaccgaaccttggaactctcctctcgtgatactccaaccctcggaaccttggaacttctgcctgtgccttactttatctcctccttgctccatctgattcatcatgggtgtaagtcttccagattcccattcttactagttaccacttcccgagaacccctcaatctgacccatctttagtttgctcagaaaattgccgcagctcagaataacgagaagatggccaatagtggttcatacggaggtgcgcctccagcaggctacactgggggccctcccgcagccttgcaaagtggcggatcggtaagtcatatgttgtgcctgtttctgctatgactcgcagttccgacgtcatcgaaaaaggaaagtgctaacgttcgcagagtcaacagccgcaataccaggcttattcaggatctccggctcctcagggatcggtacgtgctattttttcttaactctttttgctttttactttcccccacttccacgatttacccctccacggtcatcattcttctggaacaaccatgtcgggatcttaccaaggctatcctccatatggcggctcatctcaacgtcagaacaatccgtcatctccctattcccggcctccgccatccacaccctaccccgcagctcagcaatctcaacaaccgcaggcctatggccgcccgcctccacccccaccacaaggccagccctatgcctccgctagttcgccctacccaggtcagcaagcgggacagccatatgcttctccgagctcgccatacccaggacgacagtctgcacagtcgccctatcctggtcaacagcaacctccacaaggataccctggacaacaacaatatcccggacaacaacaatatcccggacaacaacaatatcctgtacaacaacaataccccggacaacaaccatatcctggacaacaaccatatcctggacagcagccgtcatatgtacaaaataccccttgccctgattcaccgcatatttctgttccgtttttgattacattggattctcgttgaacgctcaatggctggaaaagatgctaacgaaaaatagaaccaggcagcgccctattcttctcagggagctccataccccggtggccagggccgtcctggacccgcacctggaccaccaggcggaccaccaccaggccagtatggcgcacccggaggcggccctcaggctgcagctcccccggctacacagcagcaggctgcagcttaccgatcgcttttgatttcaacgattcaagagaggaatctccaaagcttctaccctccggagcgactggaccgacttgttcagtcgctcgccgccgaagcaccggctaagctcaataggctgattcaggaatgggccgtgcccatggaggtggcgaccgatgtcatgaagctctcgttgttcgacgtgattctctacgttgatgatagtggatctattgaatttgaagagaagggactccggaaggatcaactccgacagattcttggtattgtagctactgctgcatctaccttcgaccaggacggtatctccgtccgattcatgaactctagtgaggtgggcgatggcattcgcgatgcggaggatgtcagtcgtctagtgtcccgagtccgtttctccggcctgacccccctgggcaccagcttgaagtccaaggtcattgacccgatggtcgttcagcccgcccgggccaatcgtctcgagaagcctgtgctggtgatcaccatcaccgacggacagcctgctggcgagcctcacggcactgtgggtgatgtcattcgctatgcagtggaggagacgtcacggacccgttatggccctggcgccgtatccttccagttctcgcaagtgggaactgatcagcgggctcgcgactttttgggatctctggaccaggaccctcatattggccacctgatcgactgtacctccagtaagttccacatggggctcatgatggatccagctaatgtggtgttttagacttcgaggttgagcaggatgagatgtcgcgtgctaacccaccagtgcatctcactcgtgagctttgggtaagcgttatataacattgatcatcgcgtattagtaaactaactatgattacagtgtgccaaactgatgctcggcgctattgattcctcctacgacaccaaggatgaacgagacaacgaacgtcgcggtgcacctccacctgcatcgataagccagtacggaggcggaccatacggtcaacccccgccaccccagggccaagctcagccttcatatggtccgccccctggtgccccaccggcttcgtacggttcccagtccggctacccaccgcagggtggtcaataccaacagcagcctccccaacaggccccccagcagggcactcgtggtgcctatggccagcaaccgcagtatgggtcacagcctggacctggctaccagtatggcggacagccgccacgctattgatagagcatgacgtcatagggcttacgagtttcccgtttttcgccatgcggctttgagggaaggttgtggggtgatcacattttagtctacgtagcttcgaacgcgttgaacccaacttgtaacttgaatatcattgtttcgttttaaactggggatttctaggccttccaaggttacaggtctcttgtaatcgggcccgccaaggctacggagtacactaagacgaatcaacccacgggttcgctagttgaggaattgtgaaacctacatttgcagaaacactggggatacacataatacacaaaagggtcgtacatgacctagatatgtatattgttataacattttagcgaaaagagggggggaaagtcactttatactcccagtttttccgttttccatctgcaatagggttgcagggtcttgggaatgtcagggtggccaatagaaagccaggcagatctggatccagcgggccctcgtatgtcgccccaatgcagcgaggaacaatcccctttgattcgacgattcttaatttaacctggatggggctgtgcctgggtgcaggcggggatattgtatggttgcatcttacgcgttgcctaaaactctgccatgaacggggtttgttattgggacggtcttggatattgagacgtttgggttgttccacttgaactccaattttgtcgttatatgtctgcctatcatttatttccgtgtagatcgagtacgtcttccagatatagttggcgcactaggccgttttggggttaccatttctccaaacttggtcttggctactcctggcctctatctgggtttttagtcccttagtctcttggcctcttggcctcttttctttctcttctctacaggacattctacaggaaacaatcattgcgcccttcatttctatccttgcgtccgacgggagtactttcatttgctccacattcgcaacaccttcgttttacgacaaggagaacaaatcttccccgctaaaagaacagcgaaagaatgattgtctgatcagcgtgtgcaatcgaatacttcaatctacgcttgaggggaagttagtcgaggaaggatccaacaatattggtggaaaagaatcaccgagatcgtcgggttctgtcccgcgccctcgtgcctggaattcgtcatgtcgaacaaccaatttacggaagctacagagggtacccgacccgagcagaacaatgtcctccgacgcccatctcttgcgtcgtcacatacgatttccgactctgggcggcggatctcctcccaacatgtacgcttctcaaccgatctcgatcgcgagtcgatcgaggaacaacgacagacaaattgggaccgtcgtcccaattcccgcggcctgaccgtcgaaacagcgctggcgcctgcgtgtgttcgacctgctccctcacccacctctccgctctcacctaccaatgcgacccaaaatgcgactctctcccctattccctcgccaaatcctgagcccgcaggccggtctcggtcacgaaatcgtggttattcgctccggcgcagcatctttaataagacaatcaattcgacggagaaggacgatcttgccctagctgagctgggggaggccaaggaaccctcgtctgatgtgactcccacacaggcttcggctgcggagacgctcactaccgccgatgagaagcatgctctgagtgtcgcgccgacggcgacgcttgactcgatccatacagaggacgcttccccttatgtctcgtccgatcctttggagaagtctcccaaggagcagttccccgtgtctgtggcccatgagaagtggctccggaaaaaggcgactactgcagtggcagtcgcgcgtttccagactgttatggcatctatccagaaattcattctccgaaccaaggatatccctcctactcaggatgggcgccacattgacttgaatccgtctatggtggattctatgattgatgagcgcacccagaagccttatatcggtaacttcattcgttcgagtcgttacagtctctggagtttcttcccccgccaattattggcccaattcaccaaagtcgccaacttctacttcttgattatcgccatcttgcagatgatccctggcttgagtacaactggaacatacacgaccatcgtcccgcttttgatcttcgttggcatatcaatgggcaaggaggggttcgatgattggcgccggtatcgtttggacaaggaagagaataatcgggatgcttgggtgctccgcccaggccacggcacgacccaggacggagcctccatgttcagcaatactcaagattgggagcggatcaagtgtgaggaaattcgtgttggagatgttataaaacttgagcgcgaccagccgattcccgctgatattgctctcctccacgccaccggacccaacggtgtcgcttacatcgagaccatggctcttgacggcgagacaaacttgaaaaataagaagccttgccagcctgtgtctaaggtgtgctcaaccgtggaggatatcaacagcaactccttgcactttgtcgttgaggaccccaacttggatctatataagttcgacggtcatgtcactgtcaatggccaggagaaactgcccttgaccaacaacgagattgtttaccgcggcagcattcttcggaacactgaccgcgctttgggtatggtgatatatactggcgaggagtgcaagatccgcatgaacgccaacaagaacccgcgaatcaagaggcccgctctccaggataaggttaaccgtgtggtaatgctgatcgtggtgttggtcattattctagccgttgtttgtaccgtggcctacaagttctggtctcgcgacgtggagcaacattcttggtaccttcaaggtgctagtgtctcctacggcccgatcttcacttcgttcctgattatgttcaacactatgattcccatctccctgtacgtgagtatggaaatcgtcaaagttgcccagatgctgctcttgaacgatatcgacatgtacgatcctgaaaccgacaccccgcttgaagcgcgcacatctaccatcaacgaggagctcggtcaagtcagctacatcttctctgacaagactggtaccctgacaaataactcgatgcggttccgcaagatgagtgtggctggaaccgcgtggttgcatgacgcggacctccaggaggaggctgctcgtgcaggcgaccacaccaagttgatccacaaaaagcggagcgcaaaggggaaaaaggcaatgggacgcaagtccaatgtttccgaggctcagatgccccgtccgtcgaatgtttctggacaccttgatgctctccgtccgtatggccggtcggctactacgtaccgcaccgaagagatgctcgaatatatccaacgcaagccgtacaccatttttgcccgaaaggccaaactgtttattctgtccatggcactgtgtcacacttgcattcccgagcaagacataaacggaaacatcactttccaggctgcttccccggatgagttagctcttgttcttgcagcgcaggaactcggatatctcgtcgtggatcgtcaatcaaacacgttgaccgtccgcacacaaccgaacggaccagatgaagccactagcgacgaagtctacgagatcatggacgtgatcgagttttcaagcgcgcgaaagcgcatgtcagtcgtcgtgcgtatgcccgaccaacgcatttgcctattctgcaagggtgccgataccacactgatgcgtctcctgaagcaagccgatctggcacgtgataaggcgactgagatcgagcgccgtgcaagcagacgcaagaatgccgaggtgaaccaggtgatccgacgtaacagcgagcaccacagccgaaagaacagtggtgttcggaacagtatgaaccggcctagcttcagccgtcgccgctcgtcgatcactggccaacagggctcggctcttcgagctagtatcgatatttggctgcgtgaccgggagacggatgggggtatgcggaacagagaggctgatagtgagtactacagccctcggccatcggcgcagatgggcagaccgtccgctgcgatctcggactctggaagctctacgaatggtgaagaagacgaggatctcgtggaagaggcattggttgtcaacgaagcggctgttttcgagcgctgcttccagcatttgaatgactttgccactgacggcctgcggactttgttgtatggccaccgattcttggatgaagcgacctacacggattggaagactgcttacaatgaggctagcactagcctcgttgatcggcagcagaaaattgaagacgccggcgagcagattgagcagcagctggagcttactggggccactgctattgaggataagctgcaaaagggcgtgccagaggctattgacaaattgcgacgagccaatatcaagatgtggatgttgaccggtgataagcgggagactgctatcaatgtcggccattcgtgtcgtcttgtcaaggagtactcgacactgacaattttggatcaagaaaatggcgacgttgaggagacaatcgcgcatcttattggggagattacccatggccgcgtggcgcattctgtagttgtggttgatggccagacgctatcgttgatcgaagcaaatgaggtggtgcgtgagcagttcttccaactggctgtcaaggcagactcggtcatttgttgccgagcgagcccgaagcaaaaggcgttcttggtgagatcaatccgcaaacagctcaccgacgcaataacgcttgctattggagatggcgccaacgatatcgccatgatccaggaggcccatgtgggtatcggcatcactggaaaggagggattgcaggcagcacgtatttcagactactcgatcgcgcagttccgcttccttctcaagctgcttctggtgcacggccggtggaactatctgcgtgcttgcaagtatacactcggcacgttctggaaggaaatgctgttttacctgactcaagcgctgtaccagcgttggaacggctacactggcaccagtttgtatgagccgtggagtctgagtatgttcaacacgctgttcacctcgctcgctgtcatcttcttgggtatcttcaccaaagacctctcagcagcaacactactggccgtgccagagctctacaccaagggtcaaaggcacggaggcttcaatatccggctctatctgggctgggcattcatggcgacgtgcgaagcagtgataatcttctttactatgtggagtcttttcggcctggcaaaaatcaaccccagcgacaacgacattttctccatgggcctactcaccttctccgcgtgcatcatcgtgatcaacgtgaaactccaggctctggaagtccacaacaaaacctacatgtcgctaattgtaataataatttccgtcggcggctggttcatgtgggacctaatcctcgaccgtgaatacacaatgtcctccggcaaaggcatctacttcctcccgtccaacttcatccatcactccggccacaacctgctcttctggaccgtcctcctcctcgccgtctcagcagtcctcctctttgaattcacagtctcaaccctccgcgccctcttcttcccaacagacgtcgacatctttcaagaatacgaacaagacctcgacatccgcaagcgcttcgaagaagcagctgcctcggagctccagcagggctgggaccacggtaccaagagatcaagcttcgagatcgcccgcgacaacgccgagaaggttgaaatggacgcccgcgaacgccaggtccgcgagctgctcgcgcgccctcgtgtcatggataccaaggatgtcgagatcgatattgccagcgccacggttagtcataatagcagcgtgccgagtcgtgatactgaaaaccgtggtcgccaatctggcctctattccgaagacactaataggcctcggcgttctgttgagatccaggagctctttagtaagggctatggttctgtgcgcaagggtcaactcaaatgattcaagattcaagattcaagattcgtatatgtatgatgttctctcctttcttttttttcccccctgctgttatatgttcttttcgtcccgtgtctttctctcatagcgattgcatctgcgattctcctgtccatttacttatcatacgattccctcgggcatcgaagggcgttggtttggttttggttcctgtccacacttcatggtctctcctttttgttcgctgttcggtctgttgcatagtcggccgtcagttataagataccccgactcacatcgttggcagtctggctttttttgtgcgtgtgattcccctttttgctaccggttgaggtgcagtatatatttttcacctcgcaaaattatttttaattaaaagattcagcagaccttttcttgctagtttgccacgaaggtgaagaattaatggagaagcaatgcggttttctagacactaaagtctagagtccagtttacatttaagggcagcttaattaatctaaacactgtatatcctcagtccactactcgtcggtatctgcctccaatgctcctcttagatcttcaagatgtctgagcatgtgcaaactagttcaaataaagacgcttgagaataagcgagcgaatgcttccatcaccggctgatgcgttggtctcaaacgaatctgaaacttggcaggcatttgtcgacaacttttccaaaaccatgtaccacttcggagcttgccttcgagtgcgaacacgacgagcacttgcggttctcgattgtgggataatagcggcggtgttaaaggcaaagaaggtagtgggctcgaagtactccgaattctaggactagaagtagctacgacttttaagcccgaaaaagaaatgccttaagaaccaagaaaacaaagaaaaaacgccaaccactcttgaacttgtgaggccttgaaactgcgatttcatctcttccagataccacgtctaaccccggccgcgctggccacgcgcacgctgcaccgtagccttaccacgcgccaaaccgacaccgcgcccgcgctggcctcgtgtacggaacatgggtgcattcctagaagagagtagacagtcagcaaaggtgaaactggagatgcgcagttccgcaaaatcgtaaattgcgatctaaaagctggatatccgagttcgacgtaccggagcatgtcaggcacgatgaagaatcgcacgtggctgccgcgaatgtagacctggtcgagatgggagacacggccatcgcgagcggtgacggtgatgtccttgagctgaacgttcatgttgtcctcggctgtaggaaagagcagtcagtatgtgaccgcgcaaaagaaacattccccgatgcttgtttgacctctagatagagagtagacaccaagctcgagaagaaatgaaccacgtaccttccaaaagcttcccccggtagacgactcctgatgtgatttcaattgtcacgacatggccctattggaaaacgatattagcccctctgcctcgcgcgagatcgtgcatgaattccattttcgcgcgatatgtacatggatcgtataacaatctagatagcaatatcggggaatataacgcacctgcgcttcgttgaggagcttgatcgggatgccgatcgtggaggtgagcttgcccattttgactgtgtgacggcgaacaaggatgaaaaacggttgaaataagtcgaacagaaacaccggaagcttccttcgtaccaacaagggacgaataaaggcaatgggtgatcgtggggagatggtgggacagtaacgaggtcggttaagtggaggttaagagaaaggcgagttttgcggttaagctcatcctctccgctttggctgttccaaccccgaccaaacaacaacctcaacctcaaaaaggcaccaaagaatcacccgtgatgtgcctccaataacgctctctacaccccccggacctctacatcaaaaatccgaaacccaccataatggccggctcacccaattccaacctacgcggcttcaaccacgccgtctacaccctcctcaaacaaccaactcaattcctcccacatctcacaatcccaaccttcacccagctccccgagaacctaggaccacacctgatcaacgcaaagaaagggccccaaacacaaatacccacaatccgcgccctagtcctggacaaagacaacacgctctgcgcggcgaaaacaacaaccttccccccacagatcctagccaaactctcctcactccgcacctcgccaacatccctcttcaaccaaaccacacacccagactcaatcctcattgtctcgaaccgcgccgggagtcacccgcgcttcgacggcgaagtctccgagctggaagcgcagcttgcgcctctgcgcattcctgttttccggctgccggcgggcgcggaaaagaagccattttgcggcgaggaggttgtgcggtggtttcgggagaggggggttattgattctccgcatgagattgctgttgttggggatcggcttgggactgatgtgcttatggcggggatgatggggtcgtggagtgtttggtgtaaggagggtgcgtttgatgttgggatggaggggaagccggagcggaatgttttggagaagatggaggtttggattgaatggttccttagggtgaagggagggtatgaggcgcctttgccgatagggtgggagaagcagaagcagtcgtaaggcgtgtactgcgtggtggatgagacctttgatacccttgtataaactgtaccagtatgtttaccagtgtccagtatagtcggactgaactacggctacaatctacatagagctgtatgcaaaatgaatttattcagagcctagcgtcaatcccccaaactcgtataccgccagctcagcgctgtcctacttgtatggtcccgggcagaagatatcacaactctgcgcagcccagaggatcggcgttggttggatgtctgacccaaacaggtgccgacacaacaagctcatgtgcaaaaactcgactccagacccatgatgggaaacgggccattgaaagtgcagggcagacagaagtctagcaccagccttgaaattcacacaaaagagaataaaagaaatggaggggaatggagtcgcaatccaagccggtctgtttggcataaccacgtaaaagagaaatgtaaaaggggaaaatggagaaaatcaaagaatagtgaaaatcccggtcataagtcagaagaacatgaagaatggtaaattgaccgggagcaaagaagagaaaaaaaagtcctgtgggaaacaggaacaaaaagagcaaaaaatcgcttcaggaccggccccagaatagaaagggtataatcaatacaacaagacacaagggtatgtcacgcaagaaacacatcaaagggtaaaatcgcttccctagccatcgccagcgagacgagaatcatccgaaaagagccgtcgagtgggtgtttcaaaacaccgaaactcgacttgctgatatcggacaattaagaaacttcccaaggtgaaaaaaaccccaaagaacccatcgacaagcataagcgccgcatgcacagaaaaggccgtgaaacatcaagagacaaaggagaaacacaaattcaaaaaaaacccctgagaggcaccacactcgtggttatgacccagttggcataccctgcgagtttatctcatccaggttagccataccgtgggagtaatcacccatgccgggagaagggtgagcagagaggccgtgcataggtagttcgaagctggggctttcgtgcgaaacgtcatagttcacatgatgcttcgagtacatatcgttcatcgagagaccgtcgtcgaagctagtctgctggtcgtgcgagaaaccgtacatatcggacgagccgtgcgacatgctggatagtggcggcgagtggtttgcaatcagtgggtcggcagggctcatgctggagtaaggagacggtgcgtgagagcccattgccgaggcatccgttgaaccccccgagacgaagggcacgttgaactgaggcgccatgctggcgattggtgtggactcgtcctgaccggcgttgctgtacatgggactggcgaagtcgggaggcgaaccggtggtcgtcgcggacatggggttgtggaaatctagcccatatccttgggtatcgatgcggaggtcggtggggagatgatgcactgactgtggaacgggtgcgtagatgcctgcttcggtgtggttgaatgggggtggaggtggcacatggaaggaagacatgggactctggaatgtcgagatgtcaactgcaacaggtaccgaacggcttcgttggcgcttgtggccacgagcagctggcatgttgaagcccaagtggttgctgtcctggtacaggttcatgtaagttggagcagcaaaatggttgggctgagatgcaggacgctggataaatggcggggacatcgcagctggcacggcgaagctgctgttattataagctaggcggttctggaaggactccaacgatacaagcttggcaagctgaacgctcaagaccttgggatggcctcccaggtgatgaaccatgatctgactagcttgctgctcctcggtgaaatcaccgcattggtagaatcccccggagttagacgagtccatgtaaaagtgcggcgggcggttcaactccacaacaagaccacctggtcgaggtggttccccattcggcccagggctgggatcaccagtttccaaggtgatgtttttgatataggcgaacggatactcgatcttatagccggcagcatcgttgttgatatagtaagtcatgcatgccttatcaggggaatagaaaacgaccaagtccatggcgttttgtccaatgcgccgccagctgccgacagtcaaggaacgacaggtgaagtgagaaattactagattaccaattaattaatgggcgatggagcggagggagttatcaacataccgactttgccagaagggctggtctcgtttgcgtacatgctaggctggccgtatgcgccaacccgtccaaatgggtctcttgcgccagctttgttcggatcaaactgcatcgcgagataatgtcgcatagattccgggatagagtcacatccttcgccggtctcgatgctctttttggccagcatcttgattttagcgcggctaccctgagtcagtaaagataatagaaatacaatcccgagtagcacctaccgattttggaaccagatttgcacagaccgctcggtcatattaatatctgaagcaatacgttccctggtagccgcagtaggtgttgggttcttgttgaattcaatctctagaaggacaagctgatcctgtgttgcgcgttgacgcttgttgtttttctgttgttgagtcagagtgctcttgcgaggaggtcggcgcgtaaccgacgaatgggccgttgtagcactcgaggttgacggagagggcgtagaggctggaggcgaggaagacgagggcgcaattgcgccgtttgatgggtaatgcatttctgtcaacaaagacataatgtagcgtgagtcggtagagaaatatatcgcacgaaaatcgggactgtgtccaagctgttcaatatgtttttttgggtgcgtatattgtttattttcggaaagaaaaaaagtaggtgtgacgatccggccgacaaataatgaggtgggtgtacggtacggagacggaggattggaaatattgattccctcgaagcagccacaggcgcgagagggtcaggttgaagatataaatgaatggaagtgtagcgtagggatccaatcgcgagggtgtccacgtcagtgactggggggttgggttgtaagggcgcgtcgcagaggcgtccggaaaagaggggataaataaaaaggctggccaaagcagctggaaacgaatggcaggggaataagatctccctatatcgacaggaatcaatgaagaatcaaagatgtttctgcagatgctcaaatacccaggttgaatcgatcaacggggcgggaacgggagggggggcaaaccgtcgaggaaacgaatgaattgggcagaaatgagtgaggtataatgtcgccgtgaaagaatgaaacggacgcaaaagaaaaagaaaagaatggagggaatgagaatacaagaagcgcagggcagaagaagcggatcaggagatgggagatgctgactacacagagggaaccggttgatggccaacgcaccggagcctttctggactattggcacctcgtgggggccccattgtttttttttttttttttttttttttttgggccnnnnnnnnnnnnnnnnnnnnnnnnnnnnnnnnnnnnnnnnnnnnnnnnnnnnnnnnnnnnnnnnnnnnnnnnnnnnnnnnnnnnnnnnnnnnnnnnnnnnnnnnnnnnntttggactattggcccctcgtgggggccccattgtttttttttttttttttttttctggttagggcctcgatttctgtctttttttagttctcttacgttttttccctcttttgatgtattctacgagattgcagattgcagaaaatcctggaggggtttccatccgggtcgagtgcatgaagtggtatgtatggagtggagggaaaactggttttggcccctgcgttgacctgcatgagtctaaagcagcacggcgacctggagcaataagagcgcagcgtgagcacccattgtttggaagaggggtagtgccactccttactcgtcgtcttgtccaacggtgtgactctcaggggcagttcaacctggaaatggaatgaatacaaacacactgcaataccgacaatccacgtgagatcgggaatctgagacagtgtcaagtcaatgcgttcggcaaagcgtttgacgaatgaacgagggcggacggagttggaaggacgatgtgatagttttcccctggcaagtttcccctgattcgagcaccacggtgccaggggctaagccagtggactcggccaataagcttgcagttacacgtgcagttccgcggaccgccaaaggagaaacattcaggtacccgccccggcattgattatgattggccggtgggacatgacaggtcattctagaccccgaccccgaccggtactgaattcagggtgcaactctccttcgttgccctaagtcgtacatccgccatatccggttttacgatactgatcccgtcatatgataactatagttacaacttctgtacattattctatacggatatacggagtactccgtcttcaatagccctggatcgtctcaactctccggtgcgtctgtttcttacattgtagtattttacttcgggcattctgaccctgtactgcatgtagtattcgcattcccgtgaatatgatatgtagtgcattatcatccttgacgtgcaaaatcccgggcattccaatctaggcaaataagcaaatacccctgggacagttcattgttttaactccgcgaaccggttcatccataattaccgggaaaagagaaagccccctaaaatacccaatatccaatattccaaaaatattaacttcgttagaagatgaagaaacaagcccctcgatcaagcgcttgcacatagctatccacaattgacaattcaatcccccttggccaaccggagtcattacccaactcacgcagtctatccgtagtttcccagatctgctcaataagctccattgccgagttccgctgctgttctcgatagtaagccgtcatagactcatgcttctgccgaacccacatccgatcctcaggggatacagcctccctcgcggcaatgtagaacggctggggcaacgacgaatcaggcccacaccccgtcgacagatgatccatcaacccaaagcatacatgtaccaaatgctgcacgcgcggcgagcacgtctgatctcgaaaaacccgacgcgcaagcagcaaatgcgctgtccagtaaaagcactcggtgaggatatccaggggcgtacgctcacaccgcgccggggggattccccggtatccgcatccccaagcgcgaagctcgttgtcgagttggaaggcttcgtggagaacgcctttgtcggggtgtgtttcgagcccgtcgctcacgtcgcaggctagatgcgctattcgaactaggaagcacatcaggggctgtgggcatccagtcatcttgtggaatgagggctcggtggtgtcccagcgactctggtcgggctggtagagtatgaatctttgcggggcgtagggtcttcgctgtcgggagatggctagcattacatcgaccatgccgaagcgctgtactgtcatgcgtgcgatgggattctggggtatttcgtcgaagtagcctagtgcttgcataagccaggatgcgcatttcacgtggggctccagtacgccgtctgctgtttgtgcaacgactatcccctgaagaacgacggctgtgagcagcgcttctcgctcgtgcttattgctggctacaattgcacttgagtcgcaggcggccctggcatcgatactgagcaaattctttccaagcgttctgagcattcgttgctggcgcttggctgcgagatcaatgctggttaatccgaagttgagcatatgttctgtcgatatgcagacaatcgtctcgagaagaattggtgaggatagagctgggatagagacctgccggtaggggttgtccgggccatctacagcgggcacattggatgaaacgaggcttacgtctgtgcagatagtcttgattaggaattcctattccacttacacagaatgaggccacgtacaatattcccaggcagatttgtcttctgcagattcaaaccatgtctctgtaaaaagtgccgagggtcgacctagcatgttttgttcaattgctcgacggtctttgcagcgaggcttatgtcttgtggacattggctcttttggtcgaacccatttcacacccaatggatacttgcagtccaagtcccgcgaagcacaaaacgcgcaaactggctgttgctcgtcacatttattgtgcttttttcggcattgtagacatcctgtcgcacattgatattagcgcctctactagccctaggatgagtcaccataccagtccgtgaccgggaaaacttttcgcttccagccatctatatgatcgaagaaatgatgcgctactgagtaacgagagattgacaaagaataagagtaggggtgttaactatgtgttccccgcagccttatctatgtgagagtcacctgataatcgaccaattagattgttttcacacgcaaaatgtatttcacaatgacattactttgtatatcatgaccggaaagcgtcaatgagggggatagtagtcgctgtagcgaattttttggaatttctaggaagacatcgcggcattgatttaccatacggcagcggaacccgccaaacatgcatatcgactcttcattctcattgattgggaatcgagtgggaaattcaacaaatttgattgtaagaagatacgatagagactaaactgcagagggcgccctatcccagaacctcttgaataacccgaacagttcggtcgactatcaagtcaatctcctcacgggtagtattataaggcggtgccaggataatatgatcaccattagtaccatcgataccaccatttcccggcatcaatgaaattgcatactcgggcttgaggcctgtcgcatgtagagtccgagaaagcgcctttgaaggcggatatggctctttcgtctctttatcctgaacaaattccatctataatcatgttaataaataccaacaatgagaacgaagaaaacttacagcccagaacaaacccctgcctcgaatatcaccaacatgagggtgactatccagacgctcgtgaagaagctgacccagatactctcccatcgctcgcacgttcggcagcaggttatcctcctgtataatctgctgcaccttgtatgcagccgcacaggcaacggggtgtccctggtatgtctgactgtggacaaaagcaccggtgcccttactcagagtatccacgacgtgcttgttgacgagtaatccggcaattggggcatagccggcaccgagtcctttggcaattgtctggaggtcagggatgacgtcttcttgctcccaggcatggagggttccggtgcgacccatgccggacattacttcgtctagaatgaagagtgctccatgtcgctcgcagacggctttgagtgctttgaggtatccaggcaacgggggaacacagccaagggtctattgaaacagttagcatggttatcttggcgagatcaggttgtactcacagcaccgggcattgtctcggctatgaatgcacagacagtgttggggccaagtctttggaattcgtcctccagttcctgggctagtcttgcgacgtagtcttcggtgctttcgttcgcattcattctgcggtaggggtagcattgattcacgtggtggatattcttcgaaagaagactctcatagatcctccgccgggaggcgtggtatccaacagcaagtgacccgagggtatttccgtggtaggacgactttcgagaaatgatgttaactcgctggggctcaggaacgggcaactccgtaaaatactgaatggccatcttcacagcagcctcgacagcttcggtgcctattgtgattttagtaaccaatcttggtttagcatggacagatttcttacccgagctcacaatgtaggcacgagacatctcgcctccagttgagtctaccaggaattttgccagactctccgcagcattgttggtgaaaaacatggaatagcagtaggggactttctttaactggtccaggatggcttcgtggacacgctcgtcgctgtgacccagacaggatacagccgcaccacatgttgcatccagaatttcgagaccatcctcagttatcaggtagctgcctcgaccaccgacaatgttcaagggctcatttcgtagctggtggtaaaggactccgctggatggtttgatgccagtggtgtcgacctgcttctcggacggggtaggcactgaagctgcttccagttctggctgatagtcacccattgtatggattgtgctgaagagttggagctaaaaaaaaggatgaatcaagtgatgctcactgaagatggatgtgtccgtttgaacagggagggcggggtgccatatatagactcaccccgccatggccagaaattaaaatgcagacgtaggacactgacgcttgaaaatagcccagacgcaacgccgtgattggcaagtctcgccttgtcgcacatcgtcaagttcatacttgggtacgataagctaatcccaaagaggaaatctttgtcggacccacgttcgtcgactgcaaagatctgataggttggataatccagaagatagagcttaatgataacgaagaacgaaactattgggatcgtgtttggatttcaggcaggtctcgtactctaccggctacacatatcactttcgagtccgagaaccgaccgcggcccaaacagacatcattgagcaatcagatacgaaagacgcaggttaccttgggagccatacacgcggactatatccgactcaccgtaggatgatacgcaatagagaccttatttgcgaaaccagcccgatcacaggcccagctacttactactagatagtaaattccccatcattaccaatattcaccgcaccttggctagagccgctctacataagtgcatgcagcccatgcgtacagcggttacatattgaaccgagcgagttgccttcaccggtgatctttaaatcattgctggccaacagatgccataaagcttggcacgacgcggctgtgccgttgaagaatcacgaggtcagtccttcacggatatatatttgccaaggggtgactcatagcttcatctcgtaagcgtaagataatagttatcttcagaccaagtcatttgtgcaactttacccatcgcgtaaaaccgagaaaatctttcaagcatatatttccaacccacaatggcatcatcctccatcttccccttccacgtgggcgaggcttcaaatgaacgcgtaaagctcattcccttcaacccagaccaacactgcgaaaccttcttccgcatatcatcgccccatcccgagatatacacacacttaccactactacccccggcttcagcaatcgaactcaaatccctcttctacagtaattccacgagccatattctgtctttctccaatccagagtcattcgcctttgccataatagacaagacgcagccgccgtccccagaagactctgaaggtgaactggctggcactgtgagctttattcgcacatcgccgacgaacctgtgcacagagattggattcattgtcgtcctgcctccgtaccagggaacccatgtggcaactaatgctgttggactcgctctacagcctgcatttgactccgcggagaacggaggccttggattgcgcagagtacattggtcggctagcacgatgaaccttgctagtgctcgacttgcgcagaggatgggatttgagaagatcgggatcatcccttggcatatgcggtttgtaaaagggaagctatatgggaaagttggaaatggcagggagttgccgcctggaagcgatcctgaggatctgtggagagacacgttgagtcttactctgggatgggatcggtgggaaaatggcgccagacaaagggtggtgacggctatggagagatgagcagatgaccctgccgactacatggagaatggtcgagttcgaggattggatgtcagtcatttaggtgatttcggccattcgagagtgggaaatcttttcaggaaagaacagataggaaaagtatcccaccactcaataaatccaaatggaccctctggttcaatcagaattgacgatttgctctgtctatctgggtatcatattttctattaatgatatatagtaatgtgagggtgaataatttgaagtattgactccgtatataccaatgagatgcgaacggctagctgagcctttagctgcttcgccgaccatacggttcaaatggcaaagctccggcaataatcgccatcacaaggtaaagggctgcgcatatgtaaatcggcacgggcgtgctggtctgttactaatataagcattttcccaggagagcaaagagtaaagccgtacatttgcggcctggccgataacggcactgacgattcccatgatacgattgagtccaatggcaacgccatttcctgtgccccgatgggcggaggggaagacctatcgagtaattagatatggacagagttaatcaaagtgagcaagcacatgcctcgggggtgtaggcatagagagtaccgtagtacacattcaagcaaaaagaaatagcacacgtaaagcctagattctggctcgcagtgcgcacctgtgtatagcagaaaaagaaaaccattgtgatcacagctccgataatcatggttccccgacggccccaaaaccagggcgagcgacacatgagtcccgccaacacgggaccgaagatactacaggtattgttaatagcgtagtttcgccaggtgatatacgggctactctctccaaacattgcgccccgcgatgcaaggtaggtggggaggaacacgttataaagaggatacgcgaggccgatgaggagccaggagagccaaaccagggtcgtagacagagccattttgcgagtttcaaagaggccgcggagatggaagaaaatttcgctcggtgaaatgagccgcgcaaaccaagcagatcctggaaccccacgacgagcggtttgtccgcatgcctggagccgctcaatagtgaggctgcatgggcggttgtgtcgatcggcgatgttgcgtagaacgtgcagtgcttgctcgtccttgccctcggaaatgaggaacttgggggtctcttcaaggcggatgatggtcacacgaaggatggagagaacgaataccaaggcgccagatgtgtaccacacataacgccatccctggttgttttctcgagtacacgtggaagcgtcgctacaggaaaagttgggaagaaaggcccaagcaaacagacctgcgatgagctgacccagacctacatgttgtgagtcagttcggactatccataggaggtatactggagtgtaagctcaccccaccatgccgccatgagtgtcaatagccactgttccttgctaggaaggtactcgagaaagaccgtggtatcgagaaccaggttacccccagcaccgaacgcactcaagcagacaaacaatcccagtgtgacccaagagggagctgcccccgcgacgatagtgaacacggatgagataaatagggagaagttgaaggcaaaacgccggccgatgatgtctgccgaaaagccccaaaatatggcacccaccaacataccaacataaaccgcaatggtgagcccggtggaatatgatgggttgaactccaacctggcctgggtcgaaataatggattgaatcaagagaattagcgagtcaactgcatatccgaatccgttcaggcaaaatagtttccagtggtggggtgtgaaaccaatctcatcaatggtctgtatatagaggacaaagggccacgggttaatttcatgtctcattggtggtgcgaggatattgagttcccacatcattgataagcgtcatcttcgcagcaagaacctcgtccacctcttctccttgtaagatatcttggtctccattttgaatcgatctttcctccagaaacgagttcaccagatgtttgtccttgcccgctgtacctgtagggacaattgaaccggggaagtcttgagcatccattggcagcgaagggtaatgtttctgtgatttcctccaagctttcaacagaagagaaggctgtcgcagctagtcaagagagaatgaatgaaggaagacgagaaagttccccacgaggggcggggattcctgcaagcgggacagctgtcggcaagcaataatccggctaatagatattgcttcattagcttggctattgttcgtacgaaggtcgatcacccgatggttgaggtggccatgaagctgaacgctgtcagcgataaccacatggcgaccttgatgatttaaagtcatctgtaagaccatttgggcacctgcaagggacctttgatcttgacatttcagattctagctcttccaaaggcaatataagagcgttgcaaagccgcaagacttggcgcacgaggctgaacccgcaatcgtgactcgcagagaagggctggaggggaaacgacgctattcccgattcggacagattttggcgatgccttcactagacgacttcctacagaccaatcgggaacgatgatgcatccaaggcagtcagtctcagacatcccgagcttctctaataaatgaagttccacggcacagctttgcatcagccgcaagcatttccccattcgccgcggtacccaccaaaaacccatgggtgaagaaattgacgatgaatagactcggccagttcgtgtgaaaaggttgaagtggagaatatggaaagccacgatgtcaactactagtaaatgaacaagaaacatgaaggacaggtagggcagctctgtttgtgtcgggctgcgcaaggcgaaaagcgtgtgggatccaagcgtcagctaccaacgatttcctaattgggtaacatatgccgggattttactccgacctgcgtacgcctcaaggatctagcacagtataagcactggtgactacggagtaccgggtggaatatcgactcctgcgggatccactaagaatgaccaaactaagtgaccatgaagcatgaaagggtagagggatatttgggtatttagtctatcgcacaagatcactcaacattcagattgattcaaaaaatcaagaaatactcctcataacatccgctatatgtgaactgccagaaagacatgtgaatgtataatgaatgaaagtttagtacgctggaggtggcatcgtctccgtcatgacactgtgaccatattcctgctccagctccgacgaagcggcagcaagagtggcctctgaaggaaggttgacaattgtcaggtacaaaatgttctgcaaaaggccatggtcagtcaaaaacaacaccaccaagtcagcagggaggagaaaacatgagttagacttacgctcttgatggatcttttaccagcttccagcgccattctcttcttgcggaactgctccagacgaggctcgtagtccttctccaaccgcctcaactcccgatctgtctcggattggctacgtcggtcgttcaagatacgctccctccggtcgttgtactcgtcaaggactctcctctcctcgtcatcaattctgccgcccttcttctgcgcacgctgctccggagtaggactcaacacgccgccggaaagcacaccgatgagtcctccgttgacggccggatgattggggtcaaggtaccggttgctgaagccacgaccagccggcccgctcagtacatcgttgccgttctcggcggtgtactttgcgcgagcgcgacggtcgaggtagtcgttgaagttgtcaaatgccttcttggccttgtccttggtcgaagtcttgcctccggcgggaacgacgccactcttggagcctggtgactcaggcggagaatcagacaggtactcattgtgttggcggtggttatccatatagacaagcggtgcgacagccataggcagaccgccaggtccctgcgactcgccggaaacataattacgcatccatgcactgccgccgccattgctcgagccgttggcagccagtgaggcaagctgcttgagacggctaggattcttgggctccttgagctcaggctcatgtttcataatcatgcaaaacagaccgtgaggtgcgaaaagctcgcggttgtacttgtccatgacgttgttggtcctaagcggggcgctgatcagcatcgtggcttgagaggagagtccttttgttgcacttactttcctctgacgtagcccttgttggccgcccaggcgcccgcttgcactgccgcagcgacgcccatgacgataacctcgggagtgaagctcacgccaagggagacgacttgcacgccggcgaggtacttgttgccctccaagcccgtgttagtctcatcgatgaagcgtaggaatgacctttggtcgatgccgcacaactccagagatggcgcataggcggccatgaagcctcgctcctgagatcctgggcgctgctgcggaaccacgatgggcagaggcagtggtcctcctatggtggccatcccggcttgtgagtcgtacctggggtctggggtgggttgccctccaaaaatgggattgggaccgggctgaagctgtccgtaaggtatttttccattttgagactggccatactgaggttgaccatattgtggttggccatactgtggctgtccgtaaggttgtcctgttggggaagatccgtaccgaggacgtccaggttgagggtggccgtactgagcttgattaggcgggtaactagatttgtcgtattgtgattgtgagtgcatgcggtcctgcccatgcatgggcagcttctcggactgcgcgtacataatgttggagaatcgcgacacaccagtcagtactcggttgatgaccaagagagggaaaatcagatgtaagaaataagacaaaaaagaaatgaccccttcgaatcgtggttccaagatggacaagatgccggagcgtccactggaagtgcatctgatagtgccgtgaaccgaacatcctgcatacctctttgggatatggtcgtgggtggcctcccctctatcctgtttaagttagcagggtgcatgtggctctccgtttgaaactgtgcctatgtaccttttttgtctttatccttttaccagcgtcattgtggcagcccggagaattactcctaattgaggcaactcttggtccttgtcgacctccaacgacatggagcccccaaagggccggctttctatgcccgatgcggcaaacggggattcatcacgccagtggtgtttggcattggctgactgacgcccactagcgagcggcatattactctatctgcaactgaatactctaagtgggatgtgtcgtaccaagtgccgacagaacaaggcgtgtcatttatgaacaacgaaatgtatatgagctacgtgttggaagcttcagaaacccggagagaagacaagacattcaatcaatcaatcaatcaactcacacccatcaaaccgccaaacctcgattctatcttcaccactcttgcctaaccatataccgcaaaaccactcacacgtcgacacaatggctgctccctcttccaagaccgtccaggaccttaacggctcttggactgctgtaagagacgaaagatctctcacgtctgtgtcacacgagtcctgtttgttaaccatacctacagaataacaacctgtccgaggagtcctctgccgagatcctcaagctccagggcgtcagctggctgacccgcaaggtcattgccatggccaacgtcactctcatcatcgaccagcgcaaggacgagagcggcaacatcctgctcgacattgagaacaagcctagcggcggcctccctgccacccaggagaaacgtgtcctcaactggaagcccgtcgagctcaaccacggcctcttcggcaacatccgcggtcgctcccgcatctgcaagctcgccgacctcgacgatgactacctccgccagggttgggaagacggcaccgaggaggtcatgcacttcaagaccgagcacctcgactccaagggcgtcgtcacccagcaggccatcggcttcattgtcttcgacgacactcgctaccacgccaggcgggtcctggtcaccaaggacgatggcgagaggcttgagaccaagctcgtctacgactaccagtgttagatatagaaacccggtgtatacatcaaaggacacagtaaactagctttgaggcgatctacatggatcttttcatttgtcttgacgataccgttgctacataaatttatgaaggtatttttgcctacatgagtcccttgctaaattcactttggaatactttggcatacttcggaatacatgtctctgtgcgttttctgtctgtcaaaagtagcgcgcgtgtttcagtgatgataagttgctagacaagagacagctcagaatagcataatgtgcaggtaacatagacatatggtctcgaactggcttgtgaagtacctgcggttcggcgatgggggcagaggaatccacgaggcaaggctgcgttaggcttgtcaacttctctagccgcaccattgcctggctgctggctctgacatttacctcgtgggaccgacgagacagggcaaaggcgagcgaatagggttgtgtgttaacatgtgtggggcttacggctgtctgtatgtacgattaagcatcgtgggtagatccgaaccgcgcctctgccaaggagcgatgggtcttggccaagtgtcgaaagaaacgccgcaaggatactagcatccctggcgatattgagcatacacgtacatacgtacgtagcgtaaataggtaggtatgcttcaaaccagttagtcacaggggagaattgtacagtctagcggccaaatccgacgggatttttggggcttagccactgtggtgtatttaggcacagcgtttttcgccttcaaatcgtcaattcgtcttgctttctctttccagtccttgtttaccgtatcgttgtccgaatctggcattcacctcagccttacctagtgtctccacgcggaacgggacagtcccgtactaagtgcgttggggttgatgccacatttccccgcctatccatcgacaatcatcatcaccacttggtagaatcgccatcatggtctactgcggtcgtccttcaacaagttgcagcaattgtcgcgccaagaagagaagagtaagtcattactgtttgccccccttgataaaagacagaaaatcatcagggaaaaaaaagtaaaaaagacattttggctcacatttagcctcaaaaaaagtgcgacaaagcagtcccagaatgcggccaatgttgccgcacgggtcagaaatgccccgggtacagagatcccttaagcctcgtctttcgcgatgagagcacccaggtcatcaaccgcgcccgatcaaaagtctccaagaggacttcgacgggcaccccaaccgaccgcctctcggtggagcgcacagacccatcacaggcacagaaccaacaacaaaacacctccacaccggactatcacgtcagccgcccctccgatgtggtcgacgagaccatgctggagatgagcgacttcgatgtcggagccgggatgttcgccggcggcagcttcatgcccgagttgatgagcttcaacgaccctttcaacctggacgagactggactcttctccctccaccaggatgcttcgcccagcgccatgccggtatcgggcgacggtcctggatccgctgcttctgtttctgcctccgcgtctgggcgtcgttcccgtgtgggcgcttctagtgtaggcggcgacgatgtggctctcaatcagttccctgatgacagcagcaaccgcggcgaccgccaacggctaggacacaacaatttcaccagcagtcagcccgaggtcatagcgcgtcccttctccgtgcctctcgtcatcaccggtctcaatttcttcctctctcgctatgtcgttcggcagtccggtccctcctccggcttcttcgactacgctccggccatgctggcgcaagacgacggcggcaaggacatgctcgagggtgccattctggctgtcggcttcagtgggctcgctcgcaccactagccaggccgacctgttaaccaggtctatgatgatgtacacccgcaccatggagcgtgtcaatctcgccctcgccgacccacaggccgcctgtcgcgacagcaccatcgtctctgtccttgtcctcgccctctacgagttcagcagggcctctatcgacggctggaagcaccacattgagggtgccacctcgctactcaacctgcgcggccgctcccagttctccacctcgaccggcctgcagatcttcaaggatgtcttctcccagctcctcaccaactgcctgcgcgccggttcccccattccctcgagcctacgcatgctgcgcatcgaggccggcaacgccatcagcgtctcggatccctactgggtcgcctgcagcggcatagtcgagcttctggatctcttccagcacatttccccgggcggctactcgttctttcctaactctgacggcgccccctccgctcccgccgccccttccaattcctccaactccccctctactgcctctggttcttcccccgcctctacctccatgctctccggtcctctcgagggtgccaacatctccatcgagcacctcgagcgctacctctcacaggtgctcgagattgactaccgcctcgagagtgccttctccaagtgcccttgcgagtggcagttcaccgacaaatccaactcgtccagcagcaactacgatccgactggcatccggcgcgatgccaaccacatctaccacgatgtctggattgcctccatctggaacggcatgcgcatctgccgcatcctcgccaaccacgctatcagccacctcctcctccgcggcgctaacatcgacagcaactggttctttgccaacaactacaccgaccgcctgcaccaggccacccagaccatcgtccgcctgcgtgacgagatgctcgcctccgtgccccagctcatgggctacgccacttccccggcacaggagctgcagcagcacacgcactccaagaacaacgccggctcggccgtcggcggctactatgcctgctgggttctccttactgtgggctgcatgcacaacctcagccacgagacccgtgcgtggactgctgcccagttgcgcagaatcagctgccaagcaggtcttgcgcaggcagatgatttcgccaaccttgttcaatcaagcaacctccgtccaccattgagttgatagtatggaagcatcattcaaatctagatatttcatacagcgatgaactggcctggcgacgacggagaccggtcaaactatgacctctttgtgaggcctttgatggccgatctcaaggcatacggtgctctcaaagggcttgtttgggacatttggaatgaaccagacaatgagaacttttgggttcgctcccagcagcagttgatcgacttatatattcggacacgcaaaatcttttggtaagtggttcttttttaagaaatctgggcgagttgctaatacgcagatattgaagatgccggctttgatcaagttcaactctctgggcctacgcttgcttatagccccgtgtctggcaataccttgtgggccaactggcttccccatattgcaggcaatgacactattccagagcagtacgcatatcacttagaaggagggacgggtgattgggacaatgatattcaaaacacaaacgtactttgacagcgctactgaagagcgagggccttcctgggcgtcaaatcagcatcaatgagtacgccaacatggctgaataggtccagctgggcagcctggtggatttttcgactggagcgctacgatgcatttggactgcgtggcagcggttggattcttttcttatagagcatacaccgaacatatagggttacacaagtatatatcctttcacaaatcaaaagttaaaccgagttaatcaccatgtccgggtggttaagctcgtctagggagtcgacgtcgatggcggtggacctgcgccttgccagaggtgagagagtccttggacgtatgaaaagggaggatacggacgggagttgtggggttgggaaatattacccaaaatggacagcttggagtccggcaaatggtgacagaaacggaatagcggtggcggtgcaagagaggctcacgcacagcccaaaagatgacagtggacccttaccgccaaggagatctctggggcaggtctccacatcttgaatctattcctaatggggtatgctcgatgttcgttattccacatggagatgcccgaaaccctcaagttgtcattgaatgcctcgttcttctctgtgtttaagtgcacagcccgaacgcattgcaagcttttcatcgtacacctactccaccatgggaggccgctctcttattttatcccctggacattttatttattaccctcgtagctggtgttcaaatgactcttaactttcgccctatccttcatacttgtttcatcagatcataccgattgtccagggtcttcaattcctgccctgaccttataatctagattgccctcaatcagctatcagcaagacacctacccactatattcgccgctccggcccctctcgatccaagatgacgtttggctatcaagatggtatcgcgttgttgcagctcatcgccttcgtgccctgtctcttcctcgccattcttttgtgttaccagcaaggaatgaaggccgtagcatcatgttggagattcctcattatcctcgcctgtctccgaatcgccggcgctgtatgccagctcatcaccatcactgacgactcgatcgatgttgtcaccacaaaaatcacatgcgacttgttgggcatcgctcccctaacactggctgccgtgggtctgctacaaagagtgtaagtcgcaacctgatatccacctaccagcgactcgagactaacgtaggcatgtcttgttcagaaacgcctcgatcaacaagctctccagatggatctttatcttcgtcagcatcgtcagcttggtcgggctggcccttggtattgccggcgctatcaaggccctcgatagctacaccatcccccccatgctccaggccgcattgggcatgttcgtcggctgcttgggtctcctgctgaccattctggggtacttgaccatctaccgcaacgtgatgcctcgcaacgagaagatcatcctgtactcagtctacgcctgtgcgccactgctcatcgtgcgcaccgtctacggctgcttaggtgactacacgaatatcgcgcggttcaacctgtttgagcccaaccctaccgtcaatctctgcatgggcgtcctcgaggagattatccttatgattatctgcctcgctgttggcttttactgccccccgcccaaggaacctcaaactggtaagccttgtcgttatttaacgtgattgattgttttcgtgacgaatatacgctgacaattcttagatgctgctgatacgacgaattcggatgagaccaacattgtggagaaacgctcctctccccccagcgatacccactccaacaccattgatgctttgaataaggagaaaatggctgaggaggggcgtatagggacctcgactgccgaggttttataagatctggctatccctttataccttacaaagcatctataaccttacactgtctcgggaggcctttcgttataataatacactttgggattagcccctgctgtaaatccaaaaatctaacgaatctctttttcattggtatctctttagcgttaagcacccgtctatttgatataagcctcaagaactagaatagaatactagaaattgctaaatactaaatacccttctaggaacgtttctaccactagggagaaggcctttagcagtagtttctcatcgattcatacattatggtcgagaaataaagactcgattagaactgaaggaatcagacagtcctccgtacagagtcctattcgcgtaaacgctctatcctcgatacagtacgtattattagcagtagtaactcccgtatcacaaggaagcgtatcattcttccaatcacattcattaggagtgctcgggacggacagtgagaggatatagtagagaataattatttttgatggggtatgacgggcagaactacccgcaagcggtaggaagtaataagccaataaaacaacaaaacagcccgaaggcggtctaaacaccataatgttcaacaaactacccatgagggatgggaccaacctgagaggtcaggggatcccgacctgatctctccgtgcagaacgaacattaccattctaaggtattctgatataatatgtcttgaaacatggtagttgtgccttttcggaactaatgtcttgaaaaaagattcatatttgagcgcaccgcgcaaccattcctaggtttccacgaagcgtgctcaaaagagtagggatcgattgggcgatttcatctcttgatgtcaagcaacaataagaatgttctaggtagtgcaatcaaggtgatggttctgtccctctccctcggaagagagccttgttcgcgtaaacatgaatgcacctagcctgtggatcctatgccttctgagtagtccatgagatctcataatggagtcgagttcgaggatgctcaagagcttattatttagctactgaggtagacgctagaatctagtgataggctggaatcactatgctggcggtcgtgtcatctggatcaatcgccgggccccgcgttgaggattggcctgatcgcatagttgttttaggacatacaactaagatgacctttctgaattggatattcttttgttgccaagttctgccaagttgaaaaaagtaaaagcatcgtcctttaacagtttcatacattattctagtctatgttgtggtagcacgtaaaatactaaggaattgcgtcttagcacgtaaccttgacaaagcacatctctgtcagcaaaacaattcaagtcttctcttggcttcagagataggctgcgcgctagcaaggatcgtgcatcctttcctatgcaagcttgcaggatttaaagcagattgcgtgagtattgcgcaacattacatcgaataatcgccatgtctgtactcaaaagaccccccagagaaacctaccggacgtaaacaggcctagtgtcgggtttcatagctatctctggcctcaattgccggacatcaggtggatgctcttacgatctctcagtgacgcgattatcaggtacgttgaggacatatttttctagttttataaaatcagtagaatcgccgggattgatctagactaaaagacctggttcatttatcaatctatgcactagattttccagcgccacacaacccccaaagcataatggggaccgcgggtgattctcgacaagccacggccacctcgatctacagcatagatgcggaaaatcagaccagcaacacccagacagatgatgttggaaagcctgtcagatcatggaaaagttatgtgtgggatacgtgggaacttccgcccgatcaacgctggatgctttttaaagtagacgctttcgtcctcacgttcgcgtctatcggatattttttgaagaatatcgaccaatcaaatgtcaacaatgcctttcttagcggcatggaagaggatcttcagatgtttggcaatcaattagtaactagtatgtgtcttcgttctcacctgagacgtttttaccccttcttttcgacgagatcgagaaggtttccggcatttgctaactacgactgtttacaggcacatctatctggactgtgggatacgttgttggccaaattccgtccaacttgttgttaactagaatctcgcctcgatgggtcatcccctcgctagaggtaggatggggactcgcgactatttgtacatcaagtgtcaaatcgtataaagcgttgtatgctttgcgcttcctcgtcggattctttgagtatgtcgatattccgagattctatgcactctctatggccacttactgacgccgttatagatctggattttaccccggcatacattacttactgggatcatggtacacaccacgcgaaattggaaagcgagccatggtcttctggctcgctggttcagtcggcactttgttcagcggtttcctccaagcagctgcttatacaaacttgaatgggacacatggttacgccggatgtatgtgaccgcaattatccttgttttttctctcccggttcttgaattcgctcataccgcttcatctaaaaccaaacgaaagcaagaaactaactgctgacggatgagaatagggcgctggcttttcattattgatggtatcattacgctaccgcttgctctcgctgggtacatattcttccctaaccttccgcaaagcggtaaaaagacatggtggacgacagaagaggagcatcttctgtcaatcaagagaatgcagaatattggacgtgccggcaagcagccttggactaaggcaaaggcgaaaggaattctgctgagctggcatacttatcttctccgtgagtcgtacttcatacctttcttatccttgaacaatactgacaatgtcccacagcattgctatacattctctggaacaatggaattccccaacctgctatgggatactggctgaaaagttttaatgcccatcctgctcctctccccggaacaacttacactgtcgcacagatcaataactgtgagttcgagttcgactccgagttctaaattccaatgaacctagctaatttcatatacaagtgcccctccccacgaccggtgtactcatcgtcatggcattgatttggggttggctgtccgatgggccgtgtcgtggcgctcgctggccatttatctatatcggcgccgttactactgtaagtcaaagagattttatatctgtcaattgggtttttattcagtggccagcaactaaaaccattcacagctcattttcgcctccctgatgatgaagatgcccttttacacaaacctcaaaggccgcatggttatttattggctgagtaatattggtgtaagtctacaattctgtgaaaccttcaatcgttaccctaacaatgcctttagggtggtgccggtcctttaatcctgagctggatcaacgagatctgctccgatgacacagaaaagcgagcgttgcttgttgccatggctaatgaccttgcctatgttgtacaggctgtcgtgagtctcctcgtccttttcactgattcaagctagatactaatgagcgtgaacgaaggctcccaatttcgtgtggaaaaccacagcatttcctcgtgctcccaaaggatatacttggtcgatcgtactgcaaatattgctcagtaagaagcccttgctccgtctgattcttgtttcccactaatgataatcccagtcttggtcaccgcaactattcaactgcttctgtggcgcgataagaaaaaggcaggaaaggcagaagcaggtctttcagccattgacaccctcgaatcatcatctatagagggagatatatcggtgggatctagagaggacaacggcaaagtggctagcacttctcgggtcaaacatgttggcttggattgattcaaaaatgtaactaaatatctggtgtgtcactaatccccttttaagtctggaaatgagtcaaaatataattcggatgtgacatagtgaatagaacgtaagatgcataagcatacatacatacatacatgattgcggagcgaagcgaagaaatattaaatgacaaggtctaaggtgtatgtcgtgaccaagttgtctattatgggccgttttgatgtccatcaggtgacctgggtaaatgcactagcttcaatacggctagctcatggtttatggaccaatcaaaatgaattcatactatactcataggtaatgatcattcagtcgttgagcatagagagcagatggctctgtccaagcatccacctttctctatcattatggcttccaaaatgttggggttgtcaagtgccgatcacatgccaatgcctggtttgtcaggcttcacctagctatttaagctagatctcgatcattgtagagaaccgaactttcttcatctctctctctctctcgttccaagacaaaacatgtactagatgcgttcactcgcgtcctttggagctattcgctcgtgcactagcaatcgagagaccgaccagtgtcaatcttgtcgagatgccaaaaagagagagcgttctagacgccgtgcggctatcgagctggggagaggaaaacaaaaataacgtatggaggagagttgtttacgtgtggcctacggcacccctctttccccgcactctctaattactacatagcctctcacttcacaatgactatctggaggcataagaccgacatccctagtaagctattccatttatatccacggagagatggttattgactattaatagtgcaactttcttctttttgtctttcataccttacaacacctcacaaacaactaaaattcactaccagccacaagatccttttctgatttcttcattttcctttgtatcatcagtccctctcgttttgccgtttcaagtcgcagctacttctcgtcctgaaatttcttcttcgggagcgttatcatctggccgtacttcgtgccgaatgctttcctttgccttcaacaccgccatcccacaatcgagaaacacaagtgcccgtcatgctcatactcgaaggtaaagctccgaaagtggtccatgagtttgagaaagttatcgacaaaatgcctgccaagtttcagatcaagataactgatacatttgagagcaaggcatcggccggcgtgtttgtccgaatgacctgggaggtatacgcccgcttactgtcaaccgtggatatgaagccgttacttccagttgttgggccctcgcgtattagggcccagcttctcttagaggggacttatcctagctttggttacctcgtttccctagcagacgatcaatgaaggtgcgcagaataacttgcagtatatcctattgctttccaacaggaacggagaccaacgatgaacggtaatacagacttgattgttgatagtacctatattgtaggagcattcaaatccatgggatgaatacctccatataactaatccgaagtgagcatagtaaccttggaagcataccgacggcatagtgtagtggatccaataagcttaatccgataagctaaatccgatgaactccgaaactccgaatttcccccgctttctccgagccgcctaaactccgatcttcgtcatacccgccacagttccccttgtcggtttcatctctttacaatgcctactccgtaccggacttctaactccgttatatgaggtaaattctgcaatacaatgagtcaaagcccctcaaaccgcaacgggccggggctagcgcaaagtcctgcgtctcatcgccgaaagcgaaaagtccttagttgcgagcattgccgatgctccaaattaaagtgtgatcgtaaacaaccttgtggtgcttgcacgcggcgaggatgcgagctgtcatgctcgttcttggttccccccagtgttgcaactacatccattcacattcatccaacaaagtccaatccctcgttgtcaaatgtgccatccaggaacacctccgccaccccctttgcctcattgaggcaacctgctactagttgcttggatgataggtctgagcggtcaggtcctgacgaaattcaagattcccacgatagtcgctgggaagcggttctccaacggccctttccggaacatgatcctgtcgcagcaactgatactttgtctcccttttcaattggttcgagtatctcgcttcaagatatcattgaaattttgccctctagaacgagctgcgactgtctggtttctcatttcttcaatcacatctctgctctgttccccattctccatggcccaacattccagaagcagtatgttgcattcatgcaacagccctatgaagtggatctctcttggctggctttacttttttctatgtgctctttgacattgaacactatggagccaagtgatcctagactggtcgatttatggccggcgggatctcattccaaggagcaagaggctgtgactttgtcccgccagcttcagcaaactgcgatggtttgtcttttacaagatcaatttttcatccgccataagctcagcacattcgaggctttgctgatggtgatatataatctttctcacaatgagtctgttgatcaagggtgggccctgttgggtatggccttaaatatcggcatagccctacggtgcaacgtcgactctcagggacttaaccatctcgagactgagagacgccgacgctgctgggttggtatattgactttacatacctaccaagccatcctatttcgggatatcgacatgacattccttcttgatataaaaaccacaatgcccgcagacgtgaatgatgctgatatcaccaaagagggaatttcgcggccttccagttctcccacccagatgtctgtgatgatgttcaaagctcgacttttccggatctccactcagatctgtcaccatatatctggtccttcacgacttgagatagagccattgaataaatttgatgctacaatcgccgaggaacaacagagatgggactccacatatctggcggatggtgccccgaacatattggattccagttacgcctattggtgcattctacaaacatatgcacatcaactttatcttcttctacatcgccccttccgccattctcagtcatcatacttccttgcaacatccagagagaggtgtatagcttccagtgctgccttactaggaatccatcgccagatctacgaagttccactgcttcgaccttatctctggttgcttagaggagtcacgagtttaaaggcacttcacgctgccgtggcgctcaattcgtgtcttctggatatgccatcgtcttttgattcaagctcgtaccgggaggagttaaacttacttgtgcttcgaatggagagcctttctcgtcgaagtgctatttgcttgaaggcgcatcgcatacttcttcaattacagtaggttatgctctacgtgatggcaagcaggtttaactaacgaaattttctaggactcaattcggcgcagaaaatccgcaactaccaaattcggggactcggatcgagagcacaattgaagactggactgatatgcgggaatggtttggaccggatctttttaactgggtaagacatggaacctgtgattgtttgactctatactaacttacccagaatttagataatgttggcaatcttcctgcagtttgatttctcctttacattggatggtatctccggtgattccaatgtgtatcaaatgtgttcgccacgctgactagttgttaaaagtgaaattagattcaagttcaaatactcttcagtgggtagagacgccatcaaatagcaatgtgcaaccaattgcaaagtacaaagtgcatgaataactgtttcttgacatttctttgttgcataccaccgactggtgatggaacgatgatattgatgtttgattgacctcaagatatcagatatgacgtatcggtcttcacttcaaagtaattgtgctttctcggatatcatattcaattgtctaaatcttcagttgtactgttagacaaatacgaacgagaactccttgaggagctaaatcaatatagcagactcaaaaatcgaagtctatatattgagattcaggtgagggaggagcaagtatcagccgtataaaacgaccaaaagcttaatcagactgatccagaagctgtgggtcattctttcgatcgcagaaatccccctggcttacaaaatggaagtccgatactattcggccgaaaagtgactaggactgaccggagttcaagtgcatcggagaaaaatgtggcaatggttcctacctatgtccgatgcgccgacgatcaaatccggatttggctgataaatactaggggccaaatgaaatgaattcatcaacagagcctatgattcacggcccaatgactgccttcacttaaatccggtagcttttactctatggggctcactgatagttaaaatttcggtggctttctcttcttagcccactttcttcttcatattcactgccggtcttcagttgttttcctacaatggaatcactctttcaatatcgacgtatcagacaatctgttcgcgaccaactagcggaaatcaaagaaaagtgcacctgcgagaactatacacccgggtcaccacacagctcgaggtaagtgatagctcggcgaagctttgcaaatctatctgtcaacctatgctcatactccattatccagctgtcagtcatgcaacgttgggttttcttttccgccgaaccaatcctcgcttcaagcaaaacctcctaccgattccatcatcattgtggactgggatagtcacgatgatcctttgaaccctgcaagccagagcgtgtcgcagaagctggttatgacccttctggtctcgttacttgctttttctgtaactgccacatctgcgattgatgcttccggcgtcccacaatacagtgaatacttcaacgtatccgaagtagtcgggtctcttgcaacaggtaagtacagacctttgaaatgattatcccttttgcacaagttgaccgttccaacagccttatttctggtcggtttcggggccggctctctcctgtcaggcccattctccgagacatttggccggaatgccgtctacctgataacaatgctcctttttctgatttttatcatggctgcggcactcgctccaaatctccagggccacctgatctttcgttttcttgccggcttctttggctctactccactcagctgtgctggtggcacggtggcggatttgtggaatccagtacaaaagacgtacgcttttccagcctatgctattccatcatttgtgggacctatggctggtcagatcataggcagttatattcctactactttgggatggcgttggcttgagtggattatgcttatcatgggaggtgcgattcttcttattgttattgtgttccagccagaaacatacgggcctcttcttctgtactggaaagcaaagattctccgcgaagaaactggggacgagagatacaaagctccgatggagatgaaaaaccaggctttgggcccgcgactgttggcctcggtataccggccatttgcgttggtttactctgagttgattatcatcctgatgtcgctgtatcttactgttgtctatattgtcctcttcacctttttggagggatatacatacgtttttagtcatccgtatgggctttcacagcagatgactagtatactctgggtggggatgctatgtggtattcttctcactagcttcctggttccggtggtttactcctggactgccaaagagtacaagagaacttctactattgctcctgaagagcgactgtggtatgcaatgctgggtggtgcaccagcggtgccaataagtttgttctggatgggttggacctgctatgtaagtgcccttgatttgttcatcattgtcacagtcactgacttttgcgatttctccgtttagccgtccatatcgatttggtctcctctcatttcctccgtcttattcgggtacggaatcacgactattttcctttccacatacatgtatatcatagattcctatggtgtatactcagcatctgcattggggttccttgtttttactagatatgtcgtcgcaggcggtatgacagttgctggtgggcctatttaccgttctatcggtgcgcattacacattgaccattttgggggccatcagtacagccatggccacaattccgtacttgctttatgtgtacgggccgagaattcgcaaatacagcaaatttgctgtcaacaccggtgcggaatgatgcttgaaactcggcaaatcccatgcgaagagctttgctgcaaaattttatgcgttcagcaaaagactgttaattagatactgaattagaatttagagctcctaatagaatcaatcaatcaatcaattaacctgttgcagtctaactagctgcgtatgactatgtaggcacttctctactgaagcaagaactcgaagccgaacgccgagccagtattatccctagagagtcatggcttaataaaacctataaaagcctcctgtagctaggaggaaaattccttctatctctgctatcctacttctttttccccctccttccctcccttcttactactattcccgctctcccctgccctagtagtagtagtagtagtattctagcctattaattggcttattcgttaacttttactaggtctcttatctcctagcctcgttccttattattagctaatatctattatcttctataccttattccctaaactcttagcctattagttcctcctcattatccttcttagtatctatttactagaactattaaaggagacctatttggtgtctaaagttagctctatagtaggtagcctataggtttattatcatctccaatagagactgttggtacaagaactgagacatcgatgtgctgattttgcgccactattcccaaaatctgatgaacgctttgtccccgagttctggcgggcggacccgcgcggcatctaaatatccgctgaccccactttccactaggccaaatccttcagtgtaacggataaagataaaggtccgtacaagagggaaacacatgtaagcctgcacaggctcgggaaggaacatctatgtcatcgcacatctgtttcgatgtcgatccgtgaggggttcatcacatgagcataggccgatagatttccttatagtttgagaccccccggtggcccctcgagactggcaagaattagtcttggcacactatcaatacattgtgttccctccacaaagccctttgtatcttacccggttgacaggccttacacctgcataacgtttatctttacattcagatcccagcattgttaacaatacctttcttttccaatcagatcagatggaggtacagtaccggaatctcttagcaagcatagactccggccagatactatatacttatcatagaatagaccgcattacctacagctgaagatgatcataacgtcagaattgttattggagccaccgaatactccgtggatgtaacaaaaatgccttattttgcatcatttttaaggtttcgacgatcttctggtcaagaggtggcccaattgccaacgcatgacgaaatacccttcttcgatataattaacgagggcgtgaagaacggattccgccaattctttcgccgcatgccaacacagatcaatgactatcgcattctctgtgaaactctcgaatttctctgcattgatatcctctcaggtcgcaatatgcgtgatatcattcacgatttcagaaggggcaagagtgattgggatccaagggagagaattgataccggaggattgagaagtttgacacgagactcggcttttcggcttctataccagtttctcctaggtaaattcgagtcggaaatcaaggacagcaacatggcatacaacgcaaccttgttcgtcgtctcccatcgaagaattttcaaatacaaaactcggaaaatggtccgagatgggtttgaggaacggtttcaagtatcagggaagcagctacaaggactcaataagtgggcaatcgacccatcttctcctggaggcatagaagaggaggatatgtctaccgagccagaggatacggttttcgattcggattggtcatgctgaagttacagtaggatactggaccaaagggtaaaatgagtgtaattctaaaaaggagtgttctccgatgtctatcttggtgtgtgtttacaacagcttaccctataaagattcacccacccacttttctagtgccgtatagatctgctaatatttccctaattagtcttagtccctagtattgagcttgtattttgtattatatagagtccctctaattcctctcttctatattgtataacccttgaatttgtcaatttataatatgccagatgaatgctaggcagttagtgatgcacggggaccctactatatattaaatttagggtcgagagcaccattgctcggatattaaactactttgaatctgtaaatataccgaattatataccatgctacttatgcgcccaggaaaacgaagtggaggtgggtgaatctttatagggtagactgttgtacaaaatcgcgacaagtggctgctgactactaatacaacactagaagtaaggaacgtacggaagtgcgtcatttctggtcgacacaaaacgatgcctcatcttatgtagacctttttgtatggatccgacggacctacaggtcaccttacaacaaacttctcttattactcttccagaatagaatactgaaggcagcatgaatgacctggaaacagcggtctagataatgcaagtaagctacatggataaatcagggcaatactatctcgtgtaccggaagggtacatatgcgagcagcacaggataagtctgcatgaagtgggtgtatacaacttcgacaaaaatatgaaataaaaagaggtaattaaaagaagaaatctcgagaaaatagatccgccgaccaaaagtgaggaattagaaggcgtcttagatgcacgttgaccttgaaagcacgttgattatataatctcccgtgatcaagtcaagctcaaaagcggcaagaggtgagtactaaaatggaaaggggaaggcagacctatccaccccgttatttttacgatgcgggggacagctagccgtctcaataacaccacattctcccactggaaactatcaatggactgaactaggcactacctcactcagattcgctaagagacatctcaatcccaatcgcacccgagacaaaccgccatcatgacctattcagcgcccccatccaaccccgcaacctccgcgaaatccaatgtgaagaatatctccaacccgcgccgcctcctaatcctgacaccaacatctcaatccctcacaataatccccccactcctacactccctaactggtgtgcccgtcctcgacccgccacaacagccagccccttcgccaaccctgaccccaaccccaccacagccagcctcaagctcaacaccctcaccaccaacaagcactttcgctggatacacaacccacagccctctccgcctcgaaacaaaatactacagaacagaagttcccgtatgggtcgacgagatcccactcgcgatccacgatacagatgcacaaactactcccacaccaacaccaacagccgagcaatggaaaaccgacttcttaagcacagaagctgagatcgtgcgcgaagctgtcggggctctagttgtgtgcgcgcatactcctagtgatgtgacacctttaccaggctccaatgcaaacgcagaccccgccgagcggtccgacgtgcgcgcactgcgtgacctgatgcgtggtgttggcgctgtcaaggagctcattgatgaggagcgtggcgggctcggtgatgtgactggtgtgtttgtgttgattggggggaggaagggtgctgcgggtgtgggtgtgggtcagcagagatccaaggatgccgatgcggagctggggcttggcgttgatgatggggatttaggtggtggagaggcggcgccattttcggttgggtggtgggaagatcagctttttgatatgggattggtggggtgggaggttgttgagtgggatcctaaggagagtttggatgttgagacgaggaatcaatatggaggtgagttcactgaagcaacccacccattcgcggttgagcagtagtattggaggaaaaactttgcgcacctggaatatcggagcaggaatgatatgcctcacctgcgaatgggctgtatggcaagtttttggattttagctgacttatgctacttctagaacgagagggtatgcatcgtatcaaagaggtccttgagactcatgactggtctatggttgggggtgacgatggctttgacgaagataatgaccctgccatggattccgatgatgatcttcaagaccaactattaggtctgggtagctctcgtgggtttggtgatgaggttcatgaattagagcgcgaaatgttcggtttacgcatggcgatcgagcgtgggggtggtgatggtgatgagagagatgattctgacaatgatgatggcgaagatgagtttgatgttgagagcatggagacattgatgatgcgcatgcaggcaatcaagggtatgattctatgttgatttctcaggctcgctatagttgatattgcggtgtactgacttggcttagatatgagctccgagctgccggagagcgaacggaaacgattcgctgcgaaggccgtgcaagatattatgcgcgagctctgagattacttgttagtatacatagattctaatctgaatattgaatgatcatatttcattttagcatgttatgtagaccattcacattttccaccttcccacggcctatattctgttttgtgactaattcttcctaccatactagcgacaacaccaataactggggaaatatctaaaatgactttcaaaatgaccaaaaaaaaaaaaaaaaacatgacgatagatatagatcccgcactgccacaaactgagccacaccgccccaaatgtggagacctctatgcacttctgtgacgtcagaatattccaaggcacgaagccaacttgacaacgagctatgtaccgtgcatggatcaccctggttagcttattgcttgaatgaatcttggcctcactacatgatcttccccattctccacatgttgggtactcgaaagcgccgcgtcgtcatgtcttgagtctcctacacgacataccccttattcaattcctagtctacgacatattctctctcattacatgcgacctgaacatacacaataaccaattggacggacaaaacgatctcttgttttcaatatgcattttccggcacggagttgcgcccctatcctgtcggcgacgacggggaggatatcacaacgtggtgctcagtacgcctcgttggggaagattggctcggctgggatgaatgaatggtctggtaacggctcttctgttttttctagacatatccgttcattctcagggagtagtctcaccagggatattggtctcggggcttctggcgcatcaccggtaacgaagctgagatgtgctgggccggctgcagttccagaagattgccttgcctggattcagaccagaaaattccgcactgaaactcatagacaagcctcaggcgataagcagacgactgaagagctttgggagaaattccaagttaaagagggcaatcaacaagctcagcctcggcggacagttcttagggaggatggcggaaatggaaagtcactgatggaaggagagacctggcctgaaaggttgaccaaaggtaagaagggtggtattatgattgattcgagtgacaatgctgacttttggagataggcaaaatattgacgaccccttcgcggcttttcaaattgatcattcctttaaccaccgtcggcaacgacggccatgataaaggtatgtcggtcttcaacattatcccgtcacttggccatcatgctaacagtacaatcagaagtcgagcccatagctatcctaatccaccctcaacagccgctatcatacttagaaagcttgattcagtcagagctacctccaatcaaaggcaacaccgacaagctccgcccaccagccgtatccttcatcgcaatccagcacgacgacaacgctatcaaacccaaaaagcggattgagaacgagatcgacctagacgcaaaccaaaaaaaagaaataggcttcatccccggcaatgacggccttggcggtagcaaacccctgaacggccgatcatccacccagtaccgccggtcccgggaagaagacgtcgagacctacagctatccacgcaaaacaaacggcaaacctgagcgcttcgtgcgctggtcacaggccacagagattggcgacttcatccgggatgctgcgcacgcgggcgagttcatcgtgacgattgaagacgcgccgtccggcctaagtcagatccgcgtcacggtgccgtcgttcaacgagcgcacatattacctgcgcatgcggctgcgcaagctctcacggcgcattcaaaccatggcggatgtgaaggagaagtgtgatgcgctggcacatcggggtgcgcagcgggttgcgatgagcggatttggaattcttgccgtttggtggtttacggtctataggttgacattcgagactgatcttgggtgggatactatggagcctgttacttacttggtcagtttgtctacgttgatggggggttatttgtggtttttgtatcacaatcgggagatttcttacaagtctgccctggaatttaccatcagtgcgaggcagaagaaactttatttgttgcatcatgttgatttgcaactttgggagtcattggttgatgaggggaactcgcttcgtggggagattaagaatatcgcggctgagtatgatgctgagtgggatgagcgggctgatgagcagcaggatcaacgtgtaacggaagtcttgaagtcagaccgtcggcagaaacatgagaagaagaaaagcgaggatgataagaagagtgaggatgacgattgattattttgatctgttcattctccctaagtgtatgtattgcattccattccatttctggtcatccgatggtctccaagtttcatacttcaattatacaaaatagacattaaaccgcatgcatatgaagcgaaaaaccagaacaatttcttccagaaacactcaatcccaactatcacagcgttccattccgcacaggatcgtagtacttcttcggctcttcctgcctcgtacgtctgtctatatatcaacatccatcagcatcgccttcaccaatcaagcatccaaaaaggaaaagaaagatacacaatacataccagattccgaacccgcagatcccccaacctcccccttcctcctattccgattattcctcacatcacgcgaccgaaaaacactatacaacaaccagccagcaacccagttcgggccgtattcgccattcgtcgccccgcgctcgaataggccgcgcacgagcggcggcgcattgtgacagatctcgaggattgcccagcgctggcagtccgggcggatgtggtgccagaaaaaggggggacgggttgctgggtcggcgcgcacgttgtcaaggaggttggaggtgtcgaggttcatgcggttgtagacaatgattgcttcgtcctagataatattcgttagggggtacttgaaatgtatggtgtgtgtgggtgatatatgaccattggagagggaggagggaagaagtgctgaaggtccggctggtatacttactcgcatggcacggtagtattgctcatggtgcggatcttgcgggtttagacccaatgcgagcatgaattcttctttcgatactcgaggtccgacgggcattgtgattggattcctcggttgggtattgaatggggtgttggtatatagtagagccgagcttgatcgagatccaagaaagaaatcaaagatcaatgtgaatatgaactggagaagccaactcacagcccgcgccaaagccagactttatatatctgtccgcttccaattctaaaacagatcctaacggcgcggaaacccatctaacggccgttgactgcaaattgcacggcgccgaggccgccgtgccgatacaatcagagacgcctatgccggaatgaagcagagcgaacggacagcacgagacaagaaacagaaacagacgcaatcagaccaagcggggaaatgaggcaaagggcaaacccgcaatcagatcgatataacacaagcacaaggatccggagcagaggacagggatctatgggatatacttcgaggctaagccacctcttacctcgcaacaaataaagatgattattgtttcttttggcgtgcatgcatgaccgacaaagggaagcgtaaagatggagggtacgagtccagtgttgcagttgaggtattttcatttggctattctggggctttctggtctgtctcagcgcttacgattctctctccgggattagaccctagtgtacttcttgcatgatttgtggagtcgggtggtacatgtacaatgtacgtgtagatgatcactgcacagccgttgatatacaaccccgggctacgtcaaactgtgacccgggctgcagtgttcgcttttagtggtttagcgtgtgcagggtaagtaaaccgttgggggctggtggaatctagaagatatggtacggcgctgtgatacagtctttctccgggggaagtaggctgggggcatgaagttccgatgtggcaaacgagagcgtgcgtattttacagaagcgcgaaaaagaggaaagcaaaagagaaaaaggaggtagtatagattctcctattcctgttctctatctctcgctcgccccctcgaaaaggactcatctcaggccagggtgacgagtcgaataaagcgagacaatcgcaaacagagtcatcgtggacccagaacttggggtcgaggactgagcgcgaagatagcaggctaagtgcgttctggtatatcgagggcgacttgctgagctcaagtctgctatccgagacagacgggtagaaaatatatgtatgcttgcatgcatgagaaaggggtgtgttttcgaggtcagcttttacgttgtatattacccggagtacacagtcgcggatctagatcgagatctccgtccgacaagaggtacaacataggtatccggtagggaaagaaacttagtatccctgtattctaatatccctgccacgaacctgtacgcatccgccaagaagaaaatcgacacggctctagcttaacggaaccaagtctagaaagccacattccccactgaggtgtggagaaccgttcatcccaagctcgacatcgaggtccactggaacccaacccagcaacaagcgaaacattcaagccatccttgctagcggggaatagagccaaataaggcacctgtgcctacccgacggcttgcaggcatgctgcagaaaagaaactcgttggctatgtcgtgtaaccttccaggccggacactaggccaggatgcaattgagctgagatttgaccgaccggaacccaaatcggtgccgttgcttgcatctgtgtcagctttttgacttcaatggtgagcgcgtacttgcttcccgttgcggggaagggggatccgggtggaagagcttgactcgatttcaattttctcgtttgtgatgggtgcatatgcaatgggaggatagtcagttgaatgggacgagcaacgtggcaacaagtatggccgattgatggtcgaattttgaatgatcgtgtgcccttataacataatagggttgaaaatacccttgcggctgctatacgtgaaaggctattttagtaactaccaaatggtttgggcaaatagatatatcataaaaaggaaaacgacacgtaattcttgacaggagctcttaccgtcctatctccgggtcgattgaacttgtccccgttggcgctgcgattaaagaacggatgtcacattgtggacaagacaagggccagccaaggcggatcatttgcgcaccacgatttgaatgacactgcataatcccgctgctgcatttcatactagaatggattgttgagacagcaaggccaacaatatatgaggagtgtctgtatctgacgcactgaatcggaactcaagataggaagaggattctttaggggcacttcatagaactcaatggttatagctagccaaataggctagatctcagcctatgcaatatgtgagcgtgtcattgtcgctggcgtcgcaccatctccatactgcagattcccggtactcgttcatcattcactattgggcacacaaggccggatgcaagcgtaaatattgcaggacttgctgtcagttagagtagacagtggagggatatgttgttttgagcgcactaaactcgtaaagtgcagcattcaggaattagggctcgtaaagcacgcacacacagagatctagacgtaccctccaatgcaatgacagatctagctgatcaacacaaccgaccaaccaagcggcgatcaaataactatatatccagggttagatcgaccgtcccacataggcatagtataaagttccaaagttgagtcaagcttccaaggttccctagagcattcttggaagtggctgacggtcaaaaagcttttcggggcgccacttctcggctcggatgcttgaaagttatctaataatcagggcaagtgtcgggcagtacttaagcttactcaaacccaatattcgggtactcttgttgattactttagctacattctaaagtctagacatgttacaggctacttcttgcgttacatgtacccaatgcctactatacgatgacccacgaaacaaaaagcgcaggttaaaagcaagaaaacagggcctgatagaggcactcgggtttccgtatgtcgctattgttcaagacccctcggaatcgtcacgattctcgcgcctgcacctacgtgacagatcaggaacatccgtttgcacaccagcgtccggacgggaaagggagatatggtgggggatattgttatgtacgtgtcaagaaagccagagaagccaggatgggagagaagagaaagggagtgaaaaagggcaaagggggaaatgaaaatgaaaaagccagttgccatgctccatccgtcgctaaaaagaaaaaggggagggaaggatatcaaccagtccgcatgacagcttatttaagaagaggcttccttggtgggctcctcagtcttcttggtctcagtggctttggcctcctccttaggctcttcctcgggctcttctgccaccttcttcttctcctccttgacctcctcctcttccggcttctcttcttcgtcctttacctcctcgccgtagtatcggcggaggagtttctcgacctttcgatattcgaccttgacttcatccagagtatttttgatggccttgaggcaaacctccgtgtccggctcgtcaatgagacctgtctcgtccttgtgggcgccgaagttttggatcttctcgcagccgtccttcaccttgacaaggcccagtgtggcagatgagcccttaaggaagtgcccgagggcagagagttcatcgaggttcttgtcatctctgatgctggatgattagtaaaaggacaatctccaaaatttcactagctaggacatcactcacatttccttctgaattttcttgtaggtgttctcagcctggtcaaagaaaccgtacacaatgctcttgctgaagtcgcgatcctcctcgtcatcgtccatctcaaggatctgttcgaatgtgctctcgtcgagtatctccttataatcggagagcttgggagggccctgcttggcctagactcggatatcaggccgaggaacctttgaccacggggtaggaagtacttacctgctcggcctttttggtatcggctggtgccatggttgtgtatgtgtgtgtggaggggatgctttaaggagtaggtgagagcaacctcgtgtaatgcggtggtccggtggataataatgaggttgatgtatccggtctgatgtctagccaatccagatggaatactaggggctctatttgcaaatcccagtcagctcagattccaagtgatccaggtcttggatggatagaacgatgtggcaaatcgatgaacgtgaggtctcgaatgtaaagatcaatgatgatacaacaaggacgtcagaaccgtaagatctgcgcacaacgcatatgtcgtcttacaaagccagtagatgttacggattcaggaaccaatgtggtaagcgagctgttaatggggacaatggtgagcggctccggggtctatggccaaagagaagaggctggaaccgaagcgaaatacagccaccagattgagtgggtagtgagaggtgggaaaaaccaagacaacgggagttgagggggatagaggggtaatgcgataccacaacaagcaggggctggaggggggaaagaattaaaagaaccaggtgtggatgtggtatattggtagagggaataaccagggccattcagcgcatatactcgaacggtggtccagtcacagcctggtaagccagcactagcgcatcgcaagtgctgcagccccaaagccagtgtctccactagggaattgacagggaaaaaagaagatattcaaagagagaggggcaaagaaggaagtgcatcctacctatgatatttttttctcgcttctggagatgatcaagtgccgaaagtgcgacaatgggacacaataaaccgcagaaagaaaaggaaaaaggtcgaaaaggaattaaagacgcagagaaacagaaaggaggatgttgaagcaggcgagggggagggggaagagaggaaatcggaggggcggagagacagaaggtgggagaggaaggaggtgggtaggtcaactccaatccgaagggcccaattcaaggatattgggaatttagtgatttagagaggggaaatatatcagagaaaatcggcaaaaattactcaaaaataaataaattgtcagctactcatttcaaattcactagaatattgtatcgcgaatatatagataagtaatattggtattattttacattcctcgcatcgtcttggcgtggaacaaccccaaacccacgattgcactagaactagtatgttgtattattagttacggggtgctagctatacaatagtttctataaatgcgattttattcttcttctgtagctgtagccgaagtcatccaaaaaaaaaaaaaaaacaattctagacgtccgacatagactagtacattcttctactccgtatggagcagactttattgcttcttgcggctagacagcacattatcatcttagattttcagccacgatctctcgaggaactgttatctctggatcaaatttctccgagcttggttcgtgagcccagtggagtacaaccgtggcatcagctcttgaattgatgggtccactacggagtggaaagaaaatgctcggaatgaacgggacagcccctcgatgacctgctggaagtaggtttagtggagactgatagggtaaaaaaacacaccaaaaacacgacgcgttttctgaccgcaaaagacagctcctatatatctggcagcagtggccataggacgacatcatcgggccgccgatcccagcagggaacgtcatttgctctttccccatgcgaagtatggatggccacacgcggaaccatttagggaactgcaaatagccatagccttttcctttttgtccttggggttctttggaagaatatcggcagaacttttcatggctcggttagtacagcttgaaaagaaaaacaagaataaacttctagtgtctgagtctgagtagacttttagccgcgaagaaaaaaaaaaaaaaaatagggtaagacgtaataattcaggctcgtacagcagggaagcacgatcgacttgggcccaagtgtgcagatagaacttgatccagttggtctggaccctcgaggaccgtgtctaataactcggaacgcgctcgtttggattgtatgttgcatggatttctcatctgacgtactcggtgatagtgagctgaacgaccaatgtgtgagctcacggctccacggctcctttttccctctcagcggggaagaaaggggggtaatattgttgggctaagtcagatgcgaaggattatgctgtcaccgatgacgatgggagttttggtgttttcttccattcctcttttttggtctggcttcacggttcgaatgtcatatgaaaagactggaaaataggttagtgatatgtcaattgaaattggacatgtccacactcgcgaaccgcagccatctttgcttatatagaagaatgggggcatttgcgcatctcctttcccctggattttgcgcgaagtggttggctctccatcataacccaccaatgagaagatgcgacagtagccatgacatcataggatggggccgtagttcagcttcccagccgctgatgtcattttagcgtaacggcaaattacggcaatgacgtcagtcacctcataattacatcgaattactcacttacatacaacggactgtttactcatttactctctacttgtgtaccctaataattccattgtggtctgtcatgcacaaattctaaaggattatatactcataatccctcaacgcctgacagacctcaaaaggcttaagatttacaacatatgcaggataacatcatggcttcgcctacgatgtcagcccgcatacgcctatgaccaatgcatggtagaagtacggagtacggagtaatgagaaatgccaatttcgtcgatatgtgaatcagtttttggtagataatatcggagacaagtggactatgaattcaatgtacttctctctctcaggaactatcaaattagccgatctcatctcaaatcccagctttcaaatcaaacaccaatccctccaatatcccaccaaaaacaagtcgagtccaaaataggccagagtccagactatgcatgtttgctgcatacaagatagcgtcctattgcagtagtccggatcagctagtctctgtaaccctggcagccaagagcgcctctatgggaagccatccacttagctgccgacacatgcactcgattgtgagcgaatcacataaaaactattcttcggcagagagcttctgaagttgtttgcatagctatcatattcagggtgagaagaagagagactgcatggctgacttctcaaaagggcgattgcctagtagcatgtagcacccgactgaatatcagaattctagtgatactggtcttttttaatcgatattgcataaccatcccaataaaactcaacagacaacaaaataaagatgcgctataccccagatctcaaacgccttttctccacagcttcgtcgaggtcttccagaatgcttacgtaaggaaccgtgacctcggtccctttattttgttgatcgcgagcttcccaaccaaatcaacatttccagttcctccattctgggtaacatcatcaccaattgccctgcccccacgaccccaacgagaagcaattccggtcaaaaatggcatcagtcaaaacttcaagcgccccgcgctccggctcttcgggtctaacaaaagcctacctcttcacctacaacaccgtcaacctcctcgcctggggtagctgtgtcgtctacacggcatccctcctcccagccaatgtctcggccaaaactctcccgaaggtcttcggtcagactttctccccactactgctggccacccagtccctcgccctgttggaagtgctgcacagcgtggtaggcctcgtgcgcgcgccgttcatgacgactgccatgcaggtttctagtcggctgctactggtttggggaattatggcacagttcggtggggatatcgttggtgctgggcggaccacccagctgggtgattatgcgtatctcgggtgtgtctttgcttggggcatcacggaggttatccgttatgggttctttgctattaccttgtctgggaactcggtcccgagctggtggacttggttgcggtaagtcttcttttttcttctgtcgtgttccatgggctaatgagtttcgcatttgactaggtacaacaccttctacatcttctaccccattggtatctcaagcgagtgcgcgcttatattccaagcccttggacctgctggcgagctcagcccgcttttccgttatcttttgattgcgattctcgtgatctacgtgcctggtatgttcttcttacagggtccatagtattggttactgactacctaccaggatcttatgttctgtacacgcacatgattgcccaaagacgcaagatcatgcgcggcaagaagagagccgattagacagctcacccgcagcacataaatatgcttaaattgggtgggaaacgaaaagatgaattggatttatagctagcctgatgctcaaaagaaatgcaagggtctgtcgtatttaggacccatttagggtccggaggcctctaacagtgcggacatggttcttacctctggttcaatattgcaggagtcaacttgatctaagggtatagacatcatccttattgactaaaaattatcaatatgcctttttggctcaaggcttttccgcgttcctaaactgctaaaattgaaattgttacctagacgatgcgggcagagcggttggaaaacatgccttgtctaacttcttcagaactccgtcaacgtcaacgggcccgggatgtctatttgtgagctcaaagagatagccagatgctggtcttctcgggagtagcgagaaatggcattatcaaagtccccacggctgtaaaagcgctatatcaggagaggtttgaatgatggatagcgtaatggaaatgcgtcgctaggcaccgaggagggtaatgggcttcctaatgcgggtgctatgtatattgcctcctctagtaggcctgctgtaggagaaaaagagagcagtatatgggtcacaacgacgaccactctaagacttgataaggctagatcaggagatatcgcccgcacacgctatttgcgcttcgtgaatgatgattacatcagcatctacgagcgtgtgaggattgacacactagtggacctcgcctctgcttcaaacaaggatatcggcgtaatgtcttggtcgattgtagattgatcccccaaggtactccagattcaatctgctcatgaatcatgagtaacagggtccaaatcccacaagcggtagaagggcgagactccagcttactagacaaaggtaaatgtttttcagtatttagccacggctttcctacactttaagctttgggcctttgctcagatgatcttggaacaatgacgtcattatgggtctgatctgaagtcaatccccggatttccaactttccaacgttgcactctggattcaatgatggcttcacatcttaatgctaactctatttagacatggtcttcaattaattggagtgattattgttagtcaagtaaattttcaattacagagataatggggatatgaagacaagcaagagcaagcttgtattcacattgcgcgcaagactaaagatattgataatggtagtaaagtattcattggcataaaggtcatctgaaactattgtacaggtagagagttgtctttctaccacctgggtgctagcaaaaaaaggtatctcattatcccacagcagtccaattgcatgagcacccgtttagtgcttagcggcctctgtatatcattagtattgattccatgtcacaaccttgttttgttttcagtcttacccttgtggacatcagccttagtgttgtgcgacgcctcgtccttcttgtcgacaacggcatcctttgcggcggtggctcggctgcctaagctggcatcagagtccttggcgacatgcttgttggtctccttcgatgcctcagcaccaccgccctggacggtctcagcaacgtagttaacggcgttctgatatcagatattagcatttgaagacatgttatccaaagacagggtgaggcgaaccttggcggtctccataatgttgatattgaggttgtttgattgagtttggatgtttcaagtatttgttggtttgaagacttatgaaattgtatgatagaagaaggagatggtagaagcagaagaggcttcttatagtaaatggcaggtcggttggtagcagggctcaggttctgacgtcattgaacaagcaaccttggaagaaccgagcaacgagtaaccagctttgtgatgtaatgaaagggaggattacttgttcttacatgtacgatgatggaaaaaactctccacttaccaagctgttctatattgtacaataacagggtaattcgggtcggggtacattgtaggctgctttcttgaggttgtgggggaaatgacgcattaaaaacatgaactttgctattttgccatcaaaagcaagttctctacaatgtgacaagtatcacgttcactatgttgtaattagtcaatccccatgtttgatgacctcggctacatacagcagtataacggacatagcgagggtgtttctaccattaactagagtatatgatactatagtcaaaggttacagatcttacgccgttaaggtgagcaatcgtataaaataagacatattaaattgagaagactattggaagatacgtcagaagaccgcataaagccgtctattcctgttgctcatatgtagagataatgaacgtatgcgtatgttgtagcattgcttgcgcggtaagatataaacaaattttctcgacacgagcagtccttgctaggctctcccaatgagaagaaggtgcctcgcaccgactgatattaattgcttatctttgggctttgccaacattcggtagctctcaggtacatgaagatgaacagcggtatagccgtagaaacctatgtgtactattccagttggtgacgtctgaaactaactcaacccaagagcgacgagataacgaaacagcaatgtgaaatgccgatgtaaggatgttgatttcaaaataagaatgaaaaagttcagggtgagtcggccgtttatgctgcatctatccttgacaaggtcgaactagcaatctgaataattagcacgtttgagtaagatttcaatgtatatttcgatgtctttctttttctacctattatagccaggatgttaaatctcacttttatattagcatatatttgtggaatcaagaagggacctgcctgttacattgcttatttggatgttttgcttgctcatgagtctctcaaatctctctttgtcccattcgtggccttcgttgctttgcccctacaagtttacacagatgtgatgtgagaagggtaaggaatagttagatagtacagtgaaggtttccagatcaggatgacttagcggctataactagttatgacataaaagtactcccaaggcataactagatagcaacgcagacacctttccacttccattctcagtagtcaccccatgctgctccctctctagcaccctaccactcccaatgacgactctgctctcacacctgttttgcaggcagggctgtcggtgcctctatcctagggacccctcttcaatagatagaatggagatgaattgttgaagaagctagaagccataagactatggaaaaatctagcaaagtgacatacagtaggcgaaggccaataaattcaataaacacaaagcaattctgaaaggaaaaaagtagatagcgtgtttgcgcgatttcttgagccccctctatcagctaaaactcgatgccttatctgcaggaattcaaaacatggcatctatcgtaaaaatatattgtaggaatacttcatgatataggcagtcccctgtgtagcagaatgtattcctttcagacaccaaaggctttgtaaaactgataggctactatccggtgccatatctccaggacccggtgcagtaacgtatgcaaaggggctctgtttatataactggttagttgaaggtgaaatcataatgtaaaagcacaccgtgaagggtctattacactttgtcacagcagcttatctgctataagtttgccccggatcttctgggcactccatgatccatccatgggaacaagggctttcgccacagactttcccgtctccctcttcaacgacgtgatggtagttcctttattgatttggacatgaaggttgtagtattgggggcggccacttgtcagctaggaaaagtagaatgttagcgaatttcaaaatagtgaaatccatgccactcagtgtactgcgttaagataggaagaaagagagctcggtagacagaccccttgcatgtccagcctaaagttcacgtccttgaacaactcatgttctccgtgggtgaagcccaacatcttggaatctgggatgctgttgatgaagtccacaagttcttgggcggtcttttttctccccattgtaaacgtttataataatgaactaggctcggttgggcagtaagaaataagtgatgactttgagaaccgtcttgcgtgaatgatttcttgattgagatggtttgaaagacgtgtcccttctagattcttatagtactttgaaatacacaaataccctaggctctttacctcttcatggggccggcggtaactgaacccctgactacatttctaaactcactgtagtaggtccagaacttgcggagtagacccaggcggttagatttgagagttatcattatgccacgaattgaacatgattttcaaaaagaggctgaaacaagcataggtaccatgcgtaataatagtttaaatatacaatatagatctttttcatctttggcaagatcatccctgggctaaaattacgtgctaatgtggagcattacctgcattagcatacgcgcctgccccaaatattggaaaccgactattggaaaccaattagctcaatgactgcaacaatgtgatgtgatggagatgcaggttattgttattcaggattcaatctattcgcaaaaggcccgcgagatgttctaggtggacattattttagaaatttgaaacaccccctacaggaatcttagagtggcgccatctgaagcgcctatgcacatctattaagtggaaggcaaaatggactagtgtgatagcgaactaatttactttcatggttggaaagttcttttttaggcagtctaaagcagttacttgacctcactctttttagaaatacagctttcagaagcatgtgacagccagtcccctcccatgcataataatagcaatagtaccaacctacacaaactcaatggccgtggcagtctcgcccatatttacccttatcagtatatggagcatatattgagaactggacttggcgaattgcaattggctaaatggaactatcttgcctgggaatattttttagttgcattgcagaggaaaccagatcaaatacatgaatgaatcaatgagaaatacaactcgaactagaaggtccgataggtatcatttctctctagaagcacataaaaaaaaaaggcccagcgacttatgaggatattctcgggtatagaaaccactaagataatacgattatggtcatttggatcatgaggtcaagggcgaaagctttgcggacacgatagcttcatttcggctatatctaaaggaactaacatttcctcagcccagcaaaccggtctaatctttttgtcaataaataattctggtggtatgtaaatcacaagaacacttgaaggtctttgtcctaaattggccagatagggagcctcatggtgactttaccaacctaggaacggattctaggttagtggtcattggcatctttaagtatttgattcaaggtattcagaagacatggattgtttttgatcatggatattggcaggcacagatgttattgagagtgggaagccatcacactgcaaaaagccgacattgttgcactgacgctatgaccagatcctatcgcccaagctgcgcgcattgttcatatcagtggtgatgtctccgatccatgcttcgatatcacgggcggagatccaactgtcacaataagccgccgcatagtcaaagtctcttttaacctggctcttatcaaaaacttccacccatcccgggtctagttttctcatctcatctatgaatatatcgcgtaatagagtggcctcatactgccataggtgctcaaagtacacctcactgatttctccattctcctcgggtgcgtagcctcggtttcaggctctaagcgtcgtggtcgctcctctaaaaatgaaggataggagcaggctttccataaaggcaccgctgaaacgcactcccagtctaggacgccggtcatcttcccgttgtcgtcgacgaggatattatgtcgtgagaggtcggtatggaatatcattgacggttctgaatcatcatcatcatcggtggggaagaccagcggaagaagggatttgaggttatcgattattttcagtgtcctcttagcaacatccacttcgtcttcagcgtcgctatcaaggtctccggctgagtgcttattcaaagccgaatgacagtcattttcattgaatgaaaggcgagctgtgatccagtccttacttgagcggaatgggcctcgggggatatcttggtggatatgtgaatcccagaaaaatagcatagaaacaatccggcctacatcaggcaaagcccctgctggagaaccgttgtctggcggattgaatagaagagctcccgagttctttgtcgtaggcgagctaccagcatttggggcggatccctttgccggaactgatattttggtatttatcagctctctggggggcagaatttgctcgctcggtgttgaattatcaacgacagatgtctccccatagatatttccgattccgcgtagttgatttcgaaaaaggcaagcggagcttgccgcaagctccctgatcaggcatgctttcacagcaaaggaaagagatttccagatttcaccgaagggttttccaggcattttggtcatgagcatccattcaaatccaatttgtctcgagaagcttggtaggtgataactcttgggattgggagatttgtgatacggcgtatccaatccattgttgccacttcactcgtggttttataatgtggatcgacaggcaatgcgatccgcatgataaacacttcatcgtctatgctgacatcgtagaccttgttgaatccgccctgggcgaggaaagtcacttcgactgtgtctgatggccgaagcgactgtaccgtctgctttatagcgccaggttcgggttcaacagtccatcggggctcaaaaccaaatgtctcttccacccactcgaggccgcggaacggtgattcctgtgattctagcgactgcattttcgggagggggactgtagacgatgaaaccccacttttgccgccgtgttgcaatattttatctaaccgggatggagaaagtatcttcctttttgaaatactgtgagtatcgtggctgtgcatgagctgggggggtggacggtagccccatctcgggaaccttggaagctccagcctccaggttgccccgtggggcttggtattacgcacgtgactcgcatgtcattacctatcttgcaaaccggactttgtctgccaggagctttcctatcttagctgtcactcagggcaatccaggcgttgtcttagcgatctgtagagtattaatagcagctaagcttaggtatctaactatttaactaaacactgaggtctacaatgtacgccagttgttcacaaattggcgagtcctataagtcctatagagtataaattcaagaggtatcaaatcaaacaacctcatagcataattcatcgctaaacactcttaaaaaaatgaatccaccatctagataaagcacatcattagtccgaacataccacctccatagcgaacaataaccacaatcagagtcattcaaaatcccgcgacttttccctctaataaatccacaatcataccaaaaaaggcgtagtcataagcatccatatcataaatcgtaaccttcttccgccgaaaccctcactcaaacctttcccccaaacccgcccctaccatcctcctcaatcccaactctaacgggactactccccccactccaactcccgccctgcgagctgtcactcctactcccactcacagaccctaaagaaagcacatcatcctcacgagcaatcttccgtcctgcaccaatggcaacacgcagcccctgcatggctccgccatgttcatggcccgccgggtacatgccgtcgttgacggaaaagttgcggcagatgaggtaggcacgcatagcggcgctctcccgggccagcgtctcattgctgcagatactgtctgttcggtactcacgattgttgacgcgtacagtgcatgtgtatccgctgttgcttatataggcattgtagattggttcgggccagttgcggcgacgacagaggcctgcggtttggatttggttagtttggttttgggtgggtgggattggttgggctgtgttggatagtgcttcggtgtttgcttctctgcattgggtatatatttggaggcaggatatccagggttggatattggcttgtgtttgcaatgatgtatgacatacatagctcggggagggtgatagtggggagagtgacgacatactggtcaggtagaggatatagtacatcttgcaatttggactggatgcaagccgaaagcgagaaagacgggagacctggagatggcgacgggcaacggcgttgccacttgtccaactgcaacgaattgtgacggttactcggaacgcattggacggatctggcttgcagcgatacgggtttagggctgaggctggcttccagctggtttgcggtcagagaatatgcggattgtgatgcccaacgggtagggggaccgcgtttgctttgctagcagcggggaggatgtgctggcgttccaaaaaaaagcacgattttaagactagtaaaggccaagggtgtctaattcgaagaagatagaaatgaaaagtgcgagagtgagagcgatagagggattgagaacaaaactttggaagaaagattggaaatattccacacccatatacaaatcctagaaccgagtcgccctccccacctcctccgtacaacagggaaaaaagaaaaacaaattaatgaggggaaaagagctgctgcttgccatatacatgattacttctggaaaacaggtggggcttttgcattgataccattcccaagtcataccgcgagctggccggtgtacacagtaccaatagagaagggagacggtcgaaattgcgacagcgcacaaagcaacaagaaaagggggacatttggtatcagtgcagatgacctgaagaagaaaaaggtattaaaccaaagtcaattctaatacccactgttgaaagattgaaggtaaaaaagtcaagtatacagtaaacaatgacagtaagcaaacaaaaaaagtaaacaatcaaaccttgagatagatcctgggacatggatctggaatccgagtatagactacctccactgagtaaacaaagtacaaaaagtacaagaagagaagagaagacaatagatgcacgcaaacctgactcgcatcgaacctcggaaaaggcccccaaaagaaagaggcattaactcaaacgggtattcgaggtattatcgtgtcgttttctcggcgggtttatgatgcgctggcatatctctttgccagtagaatcgaaccgagttatgaggcaccggaaggcaccgtgaactgcgtagtaatgcccctgcaattcgccgatcgaagcataaacattctcggggactaagggagaccttgcaacctgtttgcagaaggtaatacctgaagatcatggatcccagtattccggagtggtttgaatggaatagcggtgctatagtggtactatgctctgtacacgggttatttttttttcgttgccattgctttctcggaatgatcccctcgtttcattttcgccccacgcatcaaagtgcaattaaatttgccgcccttatggatgtcgagacgcgcaggtctgcgaatgctgattggcgccaaggaggggccgttcatgttgtgcagaacgcgcctgaagaggggtcaattgtttatgaaagggctgagtcaatcaaggttgaaaggatcaagtacgcccaatatcggagaatgggaaattgcatgcgctccgaggaagttcagttactcgacaggcatcggactgcagtgatgagctggcattgcagtggggaaaggcgttggatttatctgcatattctaggactgacggttactttttcccccttgggcctcgtgcagctttggtggcaaacagattatgatgtacgtcgtaggaccagtgagaacggcggaaaaggtggaatcttcatcgcgcaaaaggactttgtagactccggaaatcggtgaaacagtcagttcaaaaaatagaaggaattggtgctatgtgctatgaccatgttgtagagccatactcgagccccgaacccaaccccttgcgtctcggtctcattcacagcattatccttagcttgatcgaaaaataatcctcgtggctcccatgccatgaccgctgctatgaccgcggggcttgcagtctcaagactaatcatgcataccttactcgctcggagtccctggttaccaatgacatcctgcttcaatttactatgttctcgagagactttttcaaggaaacttcatccgtcgtggcgctttgtcatgtgtcttctttccggcatcggttcacgcccctcccggttagacagtgaggggttgggcctcggaccagagccgcatttgctccgcggctttgtgcgggatcacatacaaagggtgcattggctttagccgatcaccctttgaaaacacattagctttatcgcggcttggtgaagacttccaggaaaatgacgatgtgaagttgcttgcgacactcgagtctgtccggtaatgatggttttgagtcgcgctcaatcccgccaaaacgtaacaggtgtggtatgaatcaacatgcctgggtcttggtcagctagatgcgcaaaaaaaagaactgtcacaaataggagtgaacatacttgcccggtttgtcccgaagaccaccgtcgctcccttgacaacatccaaggatgtatcgggttagaccttcgcggctgaaaaggctggtggccggtggctcagtgttatccggcttcccttccagcgaagattcaagcaatggccagcatccaccaacccaatgactgtagcatccatccactagcttatttgttcgtccggagagaccaccttccggggcggactggcgggcagacaaccacgacactagcataggaatgtccatgtgtctgcaggaaccattagcatataaagtttaaatagagtattccgggctagcgtcgcacctgtggaagatctcttcgggaggtcccaagatagatagacatgccagagcacaaaaggcgtatgctccgtgggcctctgccccagggctgccggagatacccccttcaaatgtttgacctaagcgcgagcgtcagcacatctcaaaccttgaagacagaactaccagtaatcatacatcgtgagagatattcaggaagaccactcgtcaaactctctaagcccgcctcccgcgcttgagagcccggagcaagcgtcaagggcaagtcaagtagcgagataagagtcatagcgcagtatgcgccactgcattaatgacatgtcagatcttgcattgaaggaggggattgacgagcggcttcggcccaggaattccacgtaccgtacatcttcctccccgccctcacaaacacggaatcccccatcaggctgcttcaatcggccgatccattgccacctggaaaagacagaaaccgggttagacgcaggatcacaccagacgtacatgcagaaggctgccagtgacaactcacatcgcgtgccgatccaccaatccaaaggcctcctcgcctccaaccatagccagcgatagaacagcggcataactgcccgctatatgggatgtctggccgtggccgccgccaaacccacctgtggggttctgcatcggccgaagcgtagtaatcacactaaagtagaagtttagaatggcatcttcccatattccacgttgtacaaaggagacgatcttttccgaaatcagggtatatcccctccaggggctctgtctccattctgtggatatgatatgacagataggaaaaaaagcaaattgggggagaacgaggcggggaaagggaaaataaagaaaataaatcccaaaagagtaagatgtaaagcatgcacgcaccgttcacgaaatcgagtcgtatcttcgcccagcatagcaagccccgccaacgcccagtagacaatccacgggcggctggcgtccatggcgacgaacccttcgggataatcctcgagggcatcgtagaggaagctggcgtggatatcccgttgcagggcaggtacgccatggtcgttgaagtccttctgagtgctgtggatgcctttcaagaatggcaggcatttttccagcgtcgcgttctgcagatcgatggtctccgtgatgagcgggtcgcggatgggtggcggttgcgtgaacaaggccgggatccccgggcgcggatggttggagtctggattcatggctgtagtcatggttgtcctggctgttggaattaataaagttgaagttgggcggttcttagtgttggatttgtgtgcgttcggaaatcgaacttttcgaggtctcccgatgagcggcattaaatgggatctgaggtattttggagatttgacgctcaaagaattgtaacctggactttcttgctattgttctgtagattgaatgtgaatgtagaaaagcctagaatgattctttgtttccccactcgatctctaccggaattcctatctttgacgacatcgtcacaacgtgtctggttttacttttgagtacggagtatttcttttcgagacctattaactagagataggcattctcgtggacagggaatacatagtgctatttgtgctatttgtgctagctcctgcatgtcacagaaaatagttactatatatgtgtgatggatccgacgccatgcacgccggtgcgcaagtagatggatgtgcttacatgacacccttgctgcatgtgccccccaggatctgaatttcaataaactggacgtgtccagtttcttgttttgtcaggattcacgatgctaacttggcatctcaacaggattcggactatgtccgtgcaataatatcttagccctatttttacgatttcggatttattatttcttttcggaaacaccctagtgtatggccagcagctgaaatccactaactacctttgaggcatgcatactccgtagagggaaccgaatcacgggcatgagagtgggcagacagggagctgattggatctgattaggaaggactcaacggactaatttggggataacacgatccgactgtcagatctcaccaaattcttattgccacgcaggtagtttttcccctccccactgatctcccgggtccggttttatgggatgattttctattataggatctcagttatggcctaggaatatggaatatatgtggaatatttatggaatcgtcataatagaggtatgctatacttatgatatatgagatacctatgatatctagaaattaatagtactccgcacataaaacgagaaaagaaaagaagcaaaacagaaaaaagaaaagaaaaaaggcaacttgcccgtttaggaaagaatccaaagaagaaaagaacatcatgggatcagcgaactccggattgccgtcccctccaccactctactccgtacagagacaagggcacgccgtaatctccctccccctccatctcctaatccttcctatcccaattcccgaggcaaaacacctcgacactactgcaaagctagtccgccgtggcattaattcatcgtccaatactggatcaacgttccctccacgccgtcagccagcctccactctccacaagcaactcccctagcgcatttcttcgctcaccgctgctttgtcccccccaccgcctcactttccctcttcttgatggttgtgtcacccttctgaagaaggccctctcatccaggctggtccttttcttccccttctatttcacctccccgtgatcgttttgactccaaaaaagtcatgtccaatgtcgatatatccaatgatggcctgattggcgtcgagtacgactccagaggctatcttcagcatcaatcatggcctataacgttagatcaagcgccccaacggtcagaagaggtccatggtctttccccattgcaaactggcggtcaccctctagaacagtcggtgacccaggacccaaatctcatggtggattggcactttcaaccgctacacacccctcatcaccaccatcacctctcatattcctccgaagacccctcctcggcgtcccagtattccactagttatggcatgcccatgcagtcttcccccgtcgatctcatgtcggcacagggccagatgagcgccggcttgctcgatggtccttatctgccgatgtctgcgccggtcgacatggtccccttctcgtatcaggacttccagacggatttgatgacgttccccaacggacttccggaagtttatgcccctcactccgttcttgaaagcagctcgcccaccgatacttatctggaggtccgttctctgtccagcagcgacaacggttggagtactatcgaccaccgtcgctctctcgattttggttttcccgaacaaggtgttttcgtcaaccctacccagacactgcacgatcgcagcctttcagagtcttcttactccacatcatacggcagctttgtggatatcacaaatccgatcggttctcccggttctgagaacaatatggatttgccttgctataatcaccatggccacgggcatagtcatagtcatagccatactcacagctacaaccacagccatagtcacagtcacagcagctccattggaatgcacggtaattccccgacaagcagcgcaatcgtcctccatagccagtcttcgccaggctctcgctcgccttctgcagtcagccccatcggcatggtgcgacccatcccggtcccactcaagaaatcgacctccccggcccgatcagctggatcttcgcaggtatctgcctcaccgccgagccgcaaaccgtcccgcaagagccccattgccgccaaaaccgccgagaccaaggttcgcaagcagtcccaaactggcaagcccgagaccgaaaagcgtgttggcaagagaaagggtcccctcaagcccgaccagcgccgacaggctagcgagatacggaagttgcgcgcgtgtctgcgctgcaagttcctcaagaagacgtgtgacaagggcgaaccttgcgcaggatgccaaccctcgcacgcccggttatggcaggtgccatgtactcgcattgatatcaaggaaattgggtatttcatgaaggactggaaggcagattacgaacgccacatcactatgggcttctctgtcggtaacattactggattctcggaccaagaacgcactctgttcatcacccacggttatggacagatcctgcccatcaatgctcgcgaggtctatgttcgggacgagcagtgcttcaccgttgactggatggagtcgatgcaccgggatccaacacaatatgaggtcgagactgccaaattatccgctggtatggagggcatctcgcacgcgatgctgtctgattaccttgaccgccacatcgacggcaatggcacatttgagaagttcgtcgatgattacttcgagggcactcctttcctgacgcaaatgctgaagaccgcctttcgcttctacttccgcactaagctgcccgttatccgaaaggcactcaagctggtggttgcttacaaccttaccatgcatgtcaccatggtcgaaggcattggtgaggaggaaggtttcctcggcaagatcgagagcatgggctccaagttctccggcaagaccatggcccccgtcatgatcaacttccagattaaatgtgccatggctagcatgtggcgtgagctgcagaaggatgtgctggaggagctgtcagcactctattcaagtgtgtacagcggcgacaagctgaagaactggccgacaatcttcatcttggcctccattctgctggccgtgtgggaggagatgcagttcgacagccactaccgcacaccagacgcggctgccgtcgacaagttctgcaccgacatggaaaccaccccggtgggcgtcatcgtcggactgttccaggccatctcacagaagctgcccccgttcaccgagtgggattcacaaaagcaccaccagctgttgtactccaacccagatgtttgcaacaccatgactgaagtccgccaacatgtcgagcaacatggtaagccacacactctccccgatcttcgacttcgatctccgaaactaaccccgtcttgcagaaacctaccttcgcagccgcactggcacgaaattcaaccgtggcgacttcgactgcctttcaaataaatttgtgtcgcgactggtcattcgcgccaactagacaacgaccccgatgcgcaaacgcattatgatgatgatatttaccacgactaccgtttccagcagcgagtactgttctgcgattgcgttttgaatgctcaatgttaacactgagaacatgcgaaccaatgttgtaacgatgcgagcgcacttccactctttaacgaagaatccgacgggcccccctcccagcgaggttctgccctttatttgttccgagcgaaccgactttcttttgatccagtcttttatgagccttgttttttttggttttgtcttttgtcatatttacctctttatttttccttgatcataagtcttttttttgaactttcttgtttgacttttttgctcttgtctttggtgtacacctttcttcgcatagctttgtctccagcgatgaacgaggatcacgaatgtcatgaccgtgtacggccgaattgtttctattgttttgttttcatttttgtggcacctggcacccgtcactgaacaggccaacaattcaagttaaaacagggccctgagcacggtgtacaggctgtcttatccccgaactatcacattctttgtggtggttgacgcatatcttcttgccggggaaaggggcgtcggaaggatatttgcggaagcgttctgtttatacattgcgggctttatgctctatatcttgatagtcttttaacttgaattctcatttttttccagattcttgttgatcgaactataaaaagacgaacaagacggtgaacccggatccggctctgatactaagtttggaagcgggtactgggtacccgggagacctcagcagttgccgtgtacagccccgtaccctgtactttctgatcactagcgtctccataataggtccaccccctcttttggcgataagcaattcaacgtcatcacttcgggatctggaggacaaaggggacttgagggatatgaggcgatataagagacctcaacagccttggaagattatagaattttaataatgttaagaatagtctatctgtaggtcatatccaatcaaatataggttggtttcgcaagtggcgtctatgctcaggcaccccgtttgactcatccggcatcttctggcattttcatgggcgtcacctgcgcctgactaagacacctcgccccctcatccttccaaggttccctacataaggacactgtttcccctcttcgaccttttcccttctttcaatctaccattacccacagctcgcttcacacctgagcaaccctctcttcaaatcaacgtcccaaataataagcccatcatgcagatcttcgtcaagactcgtacgttcacacccccttatcgagagataaccgcctggatcccactggccctctcgcactcaactcatggacatccttgctaacacccctttgtctatagtcactggcaagaccatcacccttgaggttgagtccagcgataccatcgacaatgtcaagtcaaagatccaggacaaggagggcattcccccggaccagcagcgtttgatctttgccggaaagcagctcgaggacggtcgcacactgtccgactataacatccagaaggagtccactctccatctggtccttcgcctccgtggcggtatgcaaatttgtatgtgttgactgccttcacgtcctcgtcgttttctctcgactaacatttgccacagtcgtcaagaccctgaccggaaagaccattacccttgaggttgagtctagcgataccatcgacaacgtgaagtcaaagatccaggacaaggagggcattccccctgaccagcagcgacttatctttgccggcaagcagctggaggacggtcgtaccctgtccgactataacatccagaaagagtccactctacacttggtcctccgtctccgtggtggtatgcagattttcgtcaagacgctcaccggcaagactatcacacttgaagtcgagtcatccgatactatcgataatgtgaagtccaagattcaagataaggagggcattccccctgaccagcaacgtctcatctttgccggaaagcagcttgaggatggtcgcacactttccgattacaacatccagaaggaatccacactccaccttgtcctccgtctacgtggtggtatgcaaatctttgtcaagactttgaccggaaagactatcacactagaggtggagagctcagacaccatcgacaacgtcaagagcaagattcaggacaaggagggtattcctcctgaccagcagcgtcttatcttcgctggtaagcagctggaggatggccgtactctttcggactacaacatccagaaggagagcactctgcacctggtgttgcgtctgcgtggtggccagtaattgacttacgattctttttcccaacttcgataggttttacatgacctgcatggcgtttagtcggtttttcgaggctgaggcttcttttcttgcaatgtgtttcctgaggacggcttctctcttttactctgcccaccttatcatcattgatatatgatagatagttctcgtcaattcactctagcaatatttgctagtctttatgccatttcattgtattgcacttgtagggtaatactaattcttgactggaattgaaatggtacataaaatgttaccgaaatagatatccttccagcatattattacacctatcttcataggcaattctattcaaccacaccatttctcgccaccttgcgttctagccagagcacgcttcagactctcaatcccttttttgcctctttgccactcgcgtgccaggaaccacttgtggcgtatggcgcagaagcgggcgacagtaaaatattaagtaatcatgcattctttatcgtgataacgacttcctctttcaacgagttccaaccacaatcgcaagctccagaggatgcgagctatcgtccgggatgcccgcttacttttatcaccttagcttgcaactcctctctcacagcccgtctgacgcgccaagctctcagggttcctcctctctcgcgctacaatccgcatgggaagctctccaacctttccaaaaacggagccggtcttcaacctccaaccgcctatcacccgcgggagataatcaaaccctattatcattagaacacactttggcgcatcgccagatatccaccctctccacccgcacaactatcccaccccgcccttcctccgccagcacttcttgcgactccaacaacccctccactagctcctcaaccagcacccaatctcttgaagacgacaagcgcttcggtgccgtctcgatcgagtgcattgacatggtcactccaaagcacccgccgaaacgcacttcgaagcgtggctccgtatctaccacagaaccagagaacctcgtcgcagcaggcatcggcacggatatcctaggcggcctccgtacgaaaggccgatatataccactcgactacgaccttgccgacagcgtctggggaattgtacatctgtaccgcgatttgcaggagacgccttacctcggaaacgatgacgagtaccccgcctatctgaagggctcctcagctgcggcccgccaacccggagagcagcaggcaacgttgaggcagggtctgaccggtacggcgggtggtcaacattctggagcggcgggtcttgcagaatatccttttcctgaaacaagttcctccactacacagagtcctgacgaggattgtacgacactatgtattctcgctgtgccatcttatctgtcgccgccggactttttgggctttatgggacagaagaccatggatgatgttagtcatttccggatgattaggactgcgcgtgcgaatcgatatatggtcttgatgaagtttcggagtgggcggaaggcgaaggaatggcagaaggaatggaatgggcatgtgttcaatagcattgagcctgagacctgtcatgtggtgtttgtgaagacggtcgaaatccaagtcgtggatgccggaacaccatctactgagcacggcgctctctctaacatcccgaccccttctcgagcacctgtatcatctaccggacaagcaactctcaccggcaagcctctcgcgccacccacccctgcactaatcgaactaccaacctgccccgtctgcctagagcgaatggacgaaactacggggcttctcacaataaactgccaacacgtcttccactgcacctgtctccagaaatggaaaggcagcggctgtcccgtatgccgatacacacaagatgactaccgcaaaagcaatgcatccctgaaaccagacgaagaaccccaacaatgcagcatctgtcactcagaagaaaatctctgggcctgtctcatctgcggcacgatcggttgcggccgctacgacaacgcacacgccttctcccactggaaagaaacagcccacgccttctccatggacctcacctcccagcgcgtatgggactatgtaggcgacgcatatgtccatcgcatcatccaaaacaaaacagacggcaagcttctcgagctacccgctgcagactacagcgccctagacccaccggactggggcgatgccgtcccccgcgagaaactagaaaacatgagtatcgaatacacacaccttctcaccagccagcttgaaagccagcgcgcgtacttcgaagaaatcgtcgagcgcgccgtcgacaaggcatcgcaggctagtgctgccgccgccgtggcggaagtcaatgcttctaacgcctcgtcgcgtctggaagaattacaagacaagtatgatgtcatgacgattgagacgctgccgtcgcttgaacacgaccgcgcacgcgccgagaaaagagcagaaaaattcgaggccctggctcgctcgtttgagaaaggattccaagaggagaaggccatgaataggaacatgttgttaaaattggagggtcttgctaaagaggttgatgggcttaaggctgcaaacgcggatcttgcggagcagaatcgcgatttgacgttctttatcagcggcacgcagaggttgcaaggccagggtgaggaagttgagcaagggactgtttctgtgcctgagccgtcggctgcttcgaaaaagaagaggaaggggaaggggaagaagtagtttgggcgttggagaagttttgcatttgcttttgctgttttaataggtgtacggttgggtggtgttacttttgctcgggattgggagtgaacggtgtccttgggtattctcttgctgtgtccctaatagggacatggttggttatatgcatttagcgaggtgtactgagtatgctatagaaacgagtgaacgaatacgaatttatgaaatacattcgatctgcaatgagtacaacaatcaaataatatacaaacagctcataaaaatgcaagtatagatacataacctcccccaaaatcatctaaacccccttcctgacagcccagaaataattcccccaatcctcactaccaggcaccatcttccacccaatcccaggaacataaacagcacccacacacttccacctcatcccctccgcaatcgcacttccgcccttcgaaacacccgtatcagcagccctcatcaacccctcctgcaaccaccccttgacctcatccgggttaacaaacttactccactcatgcgtcccccgcggcacaacaccaatcggccacggcgcttcggcaataacctggttcaagatgaacgacggcagcgtccgcgagatagtagacccaatcagccagccgccgggcttgagcgcgcgcaggcagtttgtcaggaagctgagcggtgttgaggtcttcgggtcgatgtgttcgagcacttcgaagagggtcacaatgtcatattgtgggggggtgggtttgacttcggagctgggatttggtggagtcgaagcgggagttgaagtattagcgttgccggcgagtacatcctccagcgtcgtgttgaggtacttgaagcgacctgtgcgcaggtgcgaatcgacggtcggatccaggcgcgcgtgctcgcgcgccatttggattaggtccgttgaggggtcaattgcggtcattgaggcggctagggttggggttggggctggggcggtggggtcgagtgggattgtgcgtgcgagggactcggcgaagatgccgccgccgcagcctacgtcgaggtagttgagggttgcggtggagctggttgggtctggtgatggggttccttctgctaggcaggaggcgatgaattcgtggcggagggggttcattaggtgcaggattcgggaggggcccattgggtcccaccaggagctggcgagggaggagaagtgggagagttcatcggcggagacggaggatgttgagtgcgcgcgggttgggtgtgtttgagttgatggggcggatgcgggcgcggataggaagtggtttagtgagggccttgttgagcggatggttgagcggagggctcggactgagagagggagggtacggggtcggagggaagccattttgtaggtaatggtgttggttttgggcgaggttgaggttcaatggagaattggctccggtgctctactgagctttaattgatgcggagacccgaggattatctgtgggaattgttagctgaggactttagagggatatgagaaacaatagagagcataccactaagaatatcctgagcaattgagaagagtcttggagaaagcccatgaagctgatcaccaaattggagattcaatgccgaggcaaacatgccaagacaatttggctgctgtttgagcttcctttatggccatggatttgatagttctatgattcagtcatgcctccataaacaaccatctattaaataaactccacttggtatcacaaaacaaataattcgcatcacaaattcaatacaccatcatcccaagagacaatcttcaaaacctagctcctgcggcacatgcggaagagctgactcggcttggccatcgacatcatggatctcaatatcctcggcactagtagcgtaatcccagacattctggcctgaccatgaagccaactgatctggaacagcagcgccgagtataggaaggaaattccctgtggtgatgttgcagtcgagtccaagcacggttctgcaacgatccagcaatattgggaagagatacgaaggcgagccacgaatttgagaaagtgtgtgaagtataccccacagtaactcgttcgggtcaatagtcgactcagccagtctatggacggctttcggtccaagagatctcgtcacatcggcgacggaggatcctagatcaaagagcttttgttcctatatcatccaaatcagtatacaacaaaagactccatctcggattgacctaccatgccaatcccatgcgcatcaacagctccctgcgatgcagcaccaatcacgctcatcatggatttactcaccattactggtaggtgaaatggcaaaactgcgtcatcgtgtgagccaggctgtgtggcatggctcatagacagcttccacatcatcgtctgcagccactgttgcgtgatcaagatatcaacctgttggacctcaaggactccctctagggaaatagccttgcacaggctggattggatggcggagattggcggcctctctaaaattccatctccgccaccagcggagatccaatcataaaggttcggggtgagattctcaaagatgttgatcaggttgatgaatccgtacgccaggataggatcttccgagcaaagaacctgaggcttgtgaatagagctgcgcagcataactggtttcgcttgctggagagcataacctctgccggtttacaaatcagccccagtccaaacctcattgatcctgcataagcagcgcacttacctctctgtgataaacaaaagccagaacacacgccgtctttcctccgcttcttcaaccccatactctgcatatgtcgactcgcgatgcaacccaagcgtaaatgcaaacgaggtagcctggcacaaaaagaaccaagcctgatcctgacgatcaagattcccgtatgaggcaaacaaaaagaacgaagtcagaagtgactccgtgctaagtgcttccagaagatcacaatcccgccgcgcccgcacagcctccgcaagaagttcttccccagacatcaacgagtgtccacccccaaaactctgcaaacgcgcaggatccggtatatgtgttgctccgtccaatttcaactggatatgcgtagccgcacacagcgacaccaaaagagcataccgctgcgtcgacagctgcccgggccgatggcaatctagccggagctggtccccgcggatcacgggcataatggggaacaaatacttgaggtagatattgacgtggacgagcaggatctgcggcgagagacggcgatcggccggcctcgcatagttgtaaccataaccaattgcagattcgacggttgagtccgtggagcccggggatgagacgagttccgggggcggcagatgagaaaaagtgtccgagaagtcctggcctgcgaactgtgagtccgcgattccaaattctggcgagatgggcgagttgaattggtagtccgggatctcgccggtgccggcatcctcgggatatatatgctcgggagggtcttgtcgggatgagagagggtgaatcggggctaggggatatagggtgcggaatttggggcctttccgacggaggacgtcgctgtaggagcaggacagaagtagccgtttgcatttgtcgcatggtagttcacgggaacattttatttttcggcggcgacagttgtcgcatgcttgttttggcttgggttgcttggaggacattgttaaattgctgctaggtctcgactagacgcgggagagttgaaatttcatgttcaggtggaaatatatattaaaaaaagttgcgatggtttcatccggggagttcggcataacccccattataataaaaaaacaatgcaaacctggggaagcgggggagggcaaggaacagtgagaaaccccgcaaaggcccctgcgttagtattgtgcctcatattttgatcttattcgcattggcgtccttagggatatggcgattctcgctgctcttctagattaagggtgcatttcctctcggcccgacttctctctacgtctacgtacatactcccagcctccgaactataaagaatagacagaagaccaccatggggccaccatgaaaatctactcagtgacccctcattccagatattgttacgacttctaatattaacatggatcccagacctcggaccgtaagcgaagtacatatgtacgcctttgaccaggtacggggttacggccaagtcgggtttgatgcctgactttatggcgctgattgacatgtgcactaaatcgaagatgagggatttcttgccctggttaactggtttaatatagagtgggcaccgctaggccgcgctgagtatccatctccacttagaaagttgatattcgatccaatcaattttctcacagcatcaactgtttatggatagcttttgaactgtacggagtacggaataccgagatggatctctcttatatcgtcctcggcttcccgaaagtgcaaaaaggccttatctccttctatgttggatatcatgtaaggggttgaagcgcatggttccgctatggtttgtatgctttgtacagcttagacgaggtgggactgttgaccagttgaataatgttcctgcgagggtcccgaggttccagacttactccatccttgcgcaccttgtagttataagattatccactagagagaaaaggctcaccgcagcttgccataaggaggattatacgaagcacctaaccttggaagatcataatgatgacattataatatgtaagcaggtttctatacattaattccaggttcttgtattattctgtagccgtactactgtagacgggcatttatcggacaactggccaatcaccaccctggaatgacatggtcaattgtgatcggcggtctttatacaacacaggatggtccggagtaactatcttcctaggcaagtgatatcacattcacagtaccatttcgaattctgccacttgttggtctttggcatgggaatctagagagagatatacctcttcgagcagactctggattgcttttatgatatttgaatatcatataaacatggtctaaaatgcccatgcccctcttttgtgaatcgcaggtaggtaatacggtgtcgggtcgacgtaagggtccacattcaacccagagcccagccttctttagcgcttgaagcttaaccaaccccgcaaaaacattcagccacaaggcaaagtatgtgattgtggagaatcaacggaaactcggccacggcatatcatcgggccgcaacttcctgtacacttgcagtgctataactaactggctacgctcattataaaaacgagctggcatgaaaatagccccggtcgactactagactagcgaagtggttattatggttagcgcgaagaagcttcttggctgtgcttgcctcttgccagcagcctatggtggttacttaaaatccgcccctacggccccagcctctcactctgacattgcttcttcaacttcttcgggaaaatacacacagtttaccattcccgctagcgcagatgttggcgtacagcagatcgccaatattgatgaccccgaagccgtcgatgcgcagtcggtttgtcccgggtacaaggcatcgaacatcaaggaatctgctcgtggattgaccgctaccctgacgctagccggaaagccatgcaatgtatacggaaccgatgttgactcgctgaacttttccatcgagtacctcgccaatgatcgtctcaacgtccaggttgtcccgacttatctcgattcttctaactattcgtggttcatgttggatgagcatgtcgttccccgacccacttccgaccctcatgcttcaaagacgcatagtgatcttgagatcacctggtcgaataagccatccttccatttcaaagtgacccgcaaggctacccgtgatgtcatcttcgataccactggttcagtcttggtatttgaggaccagtttgttgagtttgttacttccttgcctaaagattataatttgtatggcattggagagcacatccagcagctgcgcctcttgaataatctcacattgactctctatgcgtcggatattgctgaccctattgatgagtgagtcacatttcccaaatatatatttcccctcaattgtactgctctttgtttctgactacttttatacagcaatatttacggctcccatcctttctatctagacactcgctactatgaggttgacaacgagggtcaccatatcctcgttgcaagtgacaaggccgatccgtctaaagactatgtttccttctcgcacggtgtcttctctagaaatgcccacggccaggagatcgtcatgaaccctgagggcctgaagtggcgcaccctgggaggtagcattgatctcactttctactctggtcctagccaagcggatgtgaccaagaactaccagttgagcaccatcggcttgccagcattgcagcagtacttcacttttggcttccaccagtgccgctggggttacaataactggacggaacttgaacaagttgtctccaactttgaaaagtttgaaatcccgctcgagactatctggtaaattgactcatcgtgccttttaatggttcaagtcctaacatgactaggaatgacattgattatatgcatggttaccgcgacttcgacaatgatcaatatcgttatccctaccgtgagggtgaggtgttcctagataagttgcaccgcagtggccgtcattatgttcccattatagattcggctatctacattccaaaccccaataatgcctccgatgcgtaagttcccctatgtctgttcttcagaagcaaagctgatttatattcagctatgatacctacacccgcggacacaaagatgacgtcttcctgaagaatcccgatggaagtgagtacatcggcgctgtctggcccggctacactgtcttccccgactggcacaatcctaagacaggcgatttctgggcgaacgaaatcgttacctggaacaagaaaatagccattgatggcatctggattgatatgagtgaggtttcttccttctgcgttggtagctgcggatctggaaatcttagcatgaacccagcgcacccctcgttctccctgcccggagagcctggcaacgtgatctatgactatccggaagggtttgggctcagaaacaagacagaggctgcatctgcgtctgcagcgtcatctagccaggctgctgctgccgaaactggcagttctacctcttcgtccatctcttatctgcggaccacacccactgcgggagtacgcaacatcaactacccgccatatgtgatcaatcatgaccaagatggccacgacctcagctcgcacgctgtgtctccaaatgccactcactccgatggcgtccaagaatatgacgttcacagcctcttcggccaccaaatcctcaacgccacttatcatggcctgctgaaggtcgatgaaaagaagcgacccttcatcatcggccgctcaacattcgcaggctccggtaaatgggccggccactggggtggtgacaatgcctctaagtgggcatatatgtttttctctatcccacaagccctgtcattctccctcttcggaatccccatgttcggagtcgacacttgcggcttcaacggcaacaccgacgaagaactctgcaaccgctggatgcaactatcagccttcttccccttctaccgcaaccacaacaccctctccgcaattcctcaagagccctatatctgggaatctgtcacggccgctaccaaatccgccatggagatccgctacgcaattctcccctacttctacaccctcttccacgaagcccacaccactggctccaccgtcatgcgcgccctggcctgggagttccccacagacccctccctcgccgcagttgacacccaatttctcctcggcccctcaatcatggtcatccccgtactcgcgccgcaagccatctctgtcaagggcattttcccaggcctcaagcacggtgaggtgtggtacgattggtacactcagaccgccgtggacgcaaagccaggtgttaacactaccatccccgctccgctcgggcatatcccggttttcgtgcgtggaggcagcgtcttgccgatgcaggagccggctttgactaccaaggaggcgcgtgccacgccctggtctttgcttgttgctctcggcggcagtggagctgcctctgggaagttatatctcgatgacggagagagcaatgttccggatgacacgcttgatgttactttcaaggtcaaggggtccagcttgagtgccaaggcaaaaggtaactgggaggagccgaatcctctcgctactgttactgttctcggtgtttccaagaaacctggcactgttagacttaacggtatgcctgtcccagcttctggtgtggaatacaatgctacatcacatgtgttgtgtgtttgtggtttgcaggagttgaccaaggagggtgctttcagtgggaactggactttgaagtggtagatggtggaatctttcaagagaatgtagaattgtgtcttttattgtgcgaatctgctgtcttttctatagtctatcctaatggcaatcacattcatttattcatccctcgacacactggacaatccttacacaatggacttgtttcaagtttagtacataccctctccgttcgcaatatcttccgattgttccgggctccttattatcaaaagaccgagcgcctattgttatagtgccggcgactccgtaagctcattcagctgagtagagagacaccacacccccgcggtcgcattaacaaataggctgttcaataatccacagattctgtcgggccgacttatgaagcctatatatattttgatcgcatttcacgctataatatactcacattgtctctatgcatacggagtataagccttaaccatcctagcagcatcgcctaggccaatagcatcccgagtaaaccccgagttcatgagatcgacatcatctcaaacgagccgacaagccactgcaaccccatctccgccccccgcgtccctgcaaatttgggctccaagtccctgcgcacgctgattcgatcaacgcccgcgtcaggggcttcaacagggattgtttaatttcgcacatgccatgcgctagccttgtaatccgggctaataatttcaaggttatgcatgcattcttgtgactttgcttttttttccggcagggctggggacctgacgaattatatgtgaaggatgactatgggatttttgttttgggagatgatctttcaattaatcacggagttcttgaccatatgaagttagcagctctctctctctccttttctagtttcatcttggatatggctgtggctagggacgggcatttagagggatttacttctgatttaagtggaagcatctgtgaagatcttcgtctaagcttttagcgtctattggtttaagttatactccttctcggagtccgatttcgagagttattggcctccggtagttctatttgtctgtcgctgtatgcacggcttttgatagaatatttatatgaagtcccttgcagcgctttttgttggaatatcccgttgctgaacgattttactctctttccacattgattatcagcgctgaagatggttctcgcacgatttgcttggcttgctagcttgattagcattgccattgctgccactccagatgaatggcgctcacggtcgatctacttcatgctcactgatcgattcgcccgaacggatggttcaactactgccacctgtgataccagtgatagagtcggtttctgtctatatatcggctatgtgacaatgagatagagctaaccgtactcgctggatagaaatactgtggcggaacctggcaaggaattatagacaaggtcagtaatactctaatattacctatatcatcaagctgatcgattgcttagctggactacatccaaggaatgggcttcacggccatttggatcactcccgtgactggccaattgaccgaggatactgcgtatggctatgcctatcacggatactggcagcaggacatgtgggtatcgcaaaacagaaaagacagcccttgagacctgcatgcttacagaccctagctatgctctcaactcgaactacggaactgcagacgatctcaaggctctcgctacggctttgcatgaacgcgatatgtatctcatggtcgatgtagtagcaaaccacatggtgagttaatgcatccatgtccccaatcatgcgggctgaaactgatatgtattggataaaaagggctacgatggcgcaggcactgacgtagactacaccaaattcaaccccttcaacgatgcgaagtatttccacccctactgctcaatcgccgattacagcaacgataccatggtgcaagactgctggcttggggatgacaatgtttcgctaccggatctggatacagagagcaccgaggtgcaggacatatggtatgactgggttggatctttggtctctaactactcgagtaagttgtcttctccaatcctcacttcggcaagatatatcgccatatccgaaaactaactggtatatagtcgacggtctccgcgttgacacagtcagacacgtccagaaagatttctggcccggctataataaagccgccggcgtctactgcgtaggcgaggtctttgatggtgacgctgattatacctgtccataccaggaggtaatggacggagtgctcaactatccaatgtgcgaccccgcttgtccatggaatttaccagatacacagaggaaactaaaagctaattgaaaatagttactacccactcctcaatgcctttcaatcgacctctggaagcatgaccgacctatacaacatgataaatacggtgaaatcgacttgcaaggactcaacccttctcgggagctttgtggagaatcatgataaccctcgttttgcctcgtaagtgaaaactcaattagaccaccggaaactccattctttatgtctagaagctaatatctctccttccgaaacccagcgtcaccgacgacattgccctcgctaagaacgcagtcacattcactatcatggcagacggcattcctatcgtctacgccgggcaggagcaacactacaatggtggcgaagacccagctaatcgcgaggctgtatggttgtccgggttcaacaccgacagcgaactgtacaagctcattgcaacggccaatgctgcgagaaaccaggcgattgctaaaagtaccaactatactatttaccaggtatatgcttgtctctatgtctgtcgaaaggaaggaataagagaatgtaaatggctaactcagtcttgacagaactacccaatctacaaagacgataccaccatcgccatgcggaagggctttgacggcggacaaataatcactgtattgagcaatctcggtgcaggaggtgcagagtactcggcttcaattcctgatactggattcgcagctggtgaggagttgacggaggttgtgtcctgcgctagtgttactgccggtgatagtggggaggtgtctgttgctatggcgggtggagagcccaggattttactgcctacctctttacttgagggctcaactctgtgttcgtcgtagatctcgtgttcggggtattggtggtcgactcgaggctcaactacccgcctgtgatatatgtttcttttaatcaccatctatagttattgtgcttcgttggcaaaggggaatgcgtctaatgacttgattggtgcttttgtacttaccttggaaggattcatgaagtttgtatcatattatgttgatttggtgtttacatcgtagcgatgatagtgaattctgaaaaccgaatggagaatggagaatgtattgtaatagttgctaaatgaatccagccatagataagattcactataatgaataaaactacgaaacgaagaatcctcgaacaagtcatgactattttcattcaggtgtgcttttgctgttacgatcctgcgccagaaaaaacacaacacccaaatcccaaatctaacctcgatatcaacctaacatacaccaactccaatgatctagaaccaaaaggccaagcccacaatcccatcaccaatcatgtaatgccctcggcaccagaccaataggcatagccccaccagtcacaccagtcggaggagaatgatgaaacaaatccggagcttcaaacgcaggctgcggagccgcatacccaggcatcatctgctcaagacagttatacccctcaacaagggaatccaagccctcggagctagacataagctgcgagatatccatgccggtacgatgatggctcgacggaccgaacatctgcatgctcttaacctccgcaaccggggacgacgaatgcgaccccgcggtaacaacactcgcctccgagtaccgccgctgcacttcgccgacaatacacgcgatccggtaggagaggttgtcaccgccgggggcgaggtgcagtaggaagccgcggacttggctgattagcgggtcggtgagcgtgtagtcgcagagcgtgagcgcggcgtagccgacgatgaagtagacgtggtcgattaaggcgggtgcggaggtgaagcgcgtttggaggaattgggttatgattaggcgggcggtgccgcatatttctggaacgaggcgctcgctgtccggttggaggcgggcgactgttcggtggaggaggagttggcagaaccagagacttaggttgagcgttgagtcttcgctggtggctgtaggggtgtgtgttagattgagattggatttgatgtgcatatagggttgatgtacttagaagatgtgcccattccaatttccagcgctccaattcttcgtattcgggttctgcgaatcggagacggtgctggttgtgttgaagtcggagggcgatgcggtatagttggatttctgcgacaattctcccgtcttctggtgtggcggctgcatattctaggattcgggggcattggtcgatgtattgttgttggatattgacggtgcggccatttgcgagggcagagctattgggttattagatcgtatatccgacggttttaatggacagaacatactgtagctgggttgcgcagagtgtattccacagacgcaactgggcaagtagctcgtctggatttaaacgatctcctggcaaggtattcaggaagttaaatgagatgagcgcatggttgattgagatcccgctcagcaaccagtcgtccatgagtccttctttgtgaatggaagtagagtatagacagagcaatgtcaacgcctgcagcatatcgcttgtcatgggcgggggcttccacagcaccttcgccacggcatgttgtacacaaagtgagatatcgcggacagtgtgttgtggtaggccaggcagatagcgcgaagccaagagacatgcggtgttgaagaggagtgtatttgaccgttgaatgctggacggatgatttattgagacccaatggccgaaatattcgacaaaactagcaagatgattagcggagaattccagtggcaaacacacaatcaaacacacagttcaatcaatttcatggaaagcttggaatctacgatgccctgggtgacgatatctccgagaatgtcggcatctgataattgatctctctcgccgaagcattcggcttgcaggtctcgaatgagttgcgctggcttgagcggatagaaagatgaggacatgctatcgcttgaagatattccatctatgctgtggtttctagtttgtaaggtggggctgcagggcatgctgggggagcggttcaccatctgccgcatcagatgtatcatctcccccatgcctcgttcgagagagacaagccgttcttcgatcgatggtatagcggtggcgtcggaccaggttgatgcattgtcctggaaccgctctgttgtctccgggagctcgcaatccagcctgttatgacaataataatcagcatatggaaacgacagactccaaaaaagcaacagcatgaataaaaaggccaaacaaacctaagtgacaagcagcgacgacaagaatgaccacggggatcgacatcacagcgagtcttcagcttgcggcaggtattacaagcagtcattgatcgtcggatgcgcccttttggcctcgcatcttgacacgcgaccgagtcaattcggctgccatcatccgggacaataggcttggtgtcccacgagataggattaattgtagggccggttctcgtcattgtattgggtgttggatggttactgtgggtattgaaggtatgtaggtactgtttaggggatcatctatgtatgatggaagaaagatgagaagttggagagtaggaagagaaggctgatcaacaattggacccttaaagcaaaagcccaaaatcagaaacctgaagatcatgtctatcagggagatccaagccttataatagcgggtcactagagcactagcccgggtgagggcttttagccaattgcgacaagaggccgattactgacgatatcgtagaatccgcgcaggtacatcccgttcatggcggattctagcggaccatggcggacctggggtaatcgaatatgcatccaccaatctgaaaacttcccgccggcttctagaaaggcagcgattgtcggtgcatactttgaggaggggttgataatgtcgtattaactcccctggcccagtttctccgacgagaaccgtaggagaggggggttggagtgggctgagtggcccgatctatactccatacgtccttttgcgtttgattcttgacttgttcgtcttatttcaccagtccgaggttatcgtgggatcctttcccttttccctatctaatgcaactccttctttgcgtatttgtcttgctcggggacttccgccataatcctgatctagacaaaggtctagcataagaagggcagaccttgtagtatgatttggcaatgcctctcgttaaattcgtcctaagtggggggaggttgaggatccaagtggggagggacaacaggcacacaacgataactcggcaataattggttagcatgtgcaatgtctcaaagggaaatggctatcaggcttggggatcgcagcaatgtcaccttgtaactttccaggcccgcttaacaacggctatcctgccatttaatacccttcttgtttagcctcgagatatggcatttccagccgtcctttggctgctttttgttggatctcataggcgaatcttgtttgccccgttctccattttaattctgttttagtttcagctaaatcaacagccagaggatggtatcatatcacattcatatcattgacagcgccgatcgcactgcaattaagatcaacctcaatcttctaagaatatatgttaacgtccttgatcggcctcgttaatcaaatttcaagaccagcccaggatgcaaccctagcaattgttccaatatatcctaaaattgctaatcgcgcaacgttgagtggcaatgcggaagaatatatattagtcgcccgcggagatcatccgaggcatctttttccctggctctgaatgatccaccctatccaagtgcaatataactttcatgcagaggaattactcccgaccgttccgattcttagtgctcttttgtcttggatgcgggaatcccggaccaagaagcggtcagtttaaattggttaatacgcgaataacgtactcctgatcaaatgctggattggacttgcttggctcattgaactctggggtaacagttggctggccaggtccacagccttgacaacgacctagccgacattttcacctcggcctggctcgttatcgggatccttgattaagccccattatgcgagctatatcgagtttattattaggtaaaattttgaatttagcgtaccggaatggcccgtcaagctatgcccagagatttagcgatgcgcctcgaacggctaagatgtgggttggaatcaccgacaagggtgtaggtataggtccagctttgataggaggtaaatagagtgctagacccagtgacaaatacaacatcaccacgatcgtcgcgttaatgcgctctcaacaatactgttatctctcaagttgggagaagcaaccctcgatgttgtagattctagaagatctttctacagaacgccgatcgcatcaacctgtctcgggtaatgatactgagaaagtatatcgctcgcttcttgacggcacagcaatgcagtggcaaaccttgagtcgcggcgcgcaagtggaaatcacaggaagccacaacccctcttactactctttatgagcgtgatgcatcgacgagggggtcaacaaggcaatacagtcagatcaagctgcccataccaatatctgattggctgacataaagtttcccccctattccttcttgcttctctgcatcttccttgcagggctgtctgactcctccaatgaacaattgccatgaaaccacgcgacttggatctaattttccgagagctcgcaagctaggcgactttcgatgcagacaaggttctcgacgtagttacttgcagggaataggtatgcatgctcagagataaggactatttgactactagatattcctatcttgtttagagacatgagctacgtgcacatctttgtgatgtagatctctcgacccgacccaccgtgtctaaagctagcgcacattatagctttttgtccaatgcactattctagttgtacactccgtttaacatagcatcccgatacggccaacatgcaatatatgtgccttgtttcacgtgcataagctttaagcttggacataatctccggatcgggatttccttgctagcattgacagaaggactcccgggatcctaggaaccccgggactccggtccctattatcgaccaagagtcgcaagagccgaagctttcatctagctctaaaagctccggggcgttttcaggctacccgcgggataagtcttgatttggaaattgagtttttgaatatgtacggagtatgtatgtatgtcgagaatatgtggatgcttgcagttgtttagattgcgtctccgcctgggtgcttaggaaaccgttgggttatgtctaactataacgtgcagtccacagtatacacgtgtacattgcagctgatgaggaatattgattaggagactcgcaattcatttaagatcgctgctttcacatgctcggcttaatttcccaatgctagtaccgtgcttcgatgcatttctttctacaagtcaccttgtatattaggcttttcgtcatttaactgcctgctgcgcgtgaccccttctctctgggactacgagcgtcctgtcttcctatttttctgttctcatcgtctccttgcaattttgctttgcttccctggcactgtcgtatatgacagactcggaaagaaaaaagagagcattgtcaggtatctccctagcaaaaatgcgatcgcaacaacatgttctaagcttttacgaagcctaagcaaaagaaaatccaaaaaagaagtgaccgacgcagggatcgaacctgcaatctcttgattcgtagtcaagcgccttgccattgggccagccggccttgttatggacagttgtgtggaaatgtgcgctataagcgaattcttgtgggacacgcttatgcccgcttagacccgcctattgcacacgtgactttgaatgagctgctacaaacatgtgatttgccaaatcaaggcttgtagagttgatattttgcgtctgattgagtaatactacgttcgataagtggcacggttttctggacgcgtttatcacttcttattataaactggattggttgcctcttgatccgattgtatactttgaccagtggtgaagatttttctatgaaaataagattaatgactgcgtgaatgttgacatatttctagctttatagaatgccaatgtggagttaaatagggtagaaatatatgatcaatgtatttaatgtgggttgttgttgttaattggaaatatatagatgagcgctatgttgaatatagtatacattcaaacaggtggaaacaatgctaagatgaggagctgccataacagccaaagctgaaagatgttctgtgtagatccaaaagaacgtgttcataaagaaattatcacggtaagtctaatagaagatgaaacttgcgtagaagacatgattgaaccctagttttggacatcatggaagatccaatgaaggacataaatgttaggtggccagatcccactactaaatagaatagctagtctcgtctttcctcccttttcctctcctccttgtccatcattatccatctcaatctacacctgtcactttctctcacgagacgttccacctagtagatctctatcaataaaccatttgccttctatattacacagtgtggtgccgcataacatgttgttcgaagcagttttgttcaacatacagtcgtaaagaaattctgacgtacgtataggtctgcataagagaagagatatgatcaaccaaagatgataattaactgtgtcagatggatggaagaagatgatctagctactgccatcaagctttctaaatatcttcatgtgaataaagttacaaaggtctcatcccaaagaacccagaagaaacatctctgcagccagataaagagactgccaacacaacaagctacccgtgagaagggaacaagaaagaaagggaggtctacaaactgcataggaatagtgaaagccctaaatacatcaaatttgtcttgaaagcaggaaaatggtatgagctatgcctcgttgttacaagagccagaagtagtaacagagcgatggtaaggtatattgagccaaaccaatacagccatttttcgaaaatagctttggcaaacgacaaccatcaagcccattatcacatagcccgagaataacaaaggtaggcacacgaatatgaaatttccaatagttttagatattcgatattgaaatcgtagtagcaaagtcaagatcaaaagaaagaataaaagagactaccgagacccgagtcctacaaacatagaatatctcacggttataccacaaattgcaaagggaagttatattctagtagcaggtgtttacgagcagaggtccagccgtctgaaattacccgccaagagaccaaggtatttatataggcaatccactagaatagagtcctctatcagaaggtaggccaaatgccacgcttgatactagagtagtctagcggtaattgtaagaactgtgcattgctgtgcctaaatgagatgcgcaggctcttgaataccttaggcgatatgcctgatacctgacatcttgtatatattttctcgtatttcttcatggcattacatgtgcagtacgcacgactaaggcctgaaaattgtgcataagaactagccaatgcacttatttactacttgcatccacccttgcagaactgtggcggctacaagagaatggtaacacacagatgaaggtgtgactacagatatcattttcgatatcacaagaggtgtgagtacatagcagcattcactgctagttgggattagtagttatatgcgccatgcaacgtaatcaagagtctatctacgtagggacctggacatgttaatcgcaaaatccagtttagaacgtggctagccataccctcatcgtaaacgaacaaacagtatagaatctagtggtacctagacagaatctatataagcccataatgatacctggctcatagcatcgaggaaagagttttcatacatcgtcgactcttgtagctactatctatctcgtctacgaagtataacctggttcacaaataaaaacagacccggacgacgatccttgaaaaatggagaatgcaagtgtcaaaaataccaccacggccagactaaacggcactattgatttgagtaattagtgtacagtgggtgggtttgccgatcattcatctggaaattaaagattcaaagtttggaagcttagacatgattaaaccaagatcatcgtagccggcctgtatgtagcgaggaaaataaaaataattatcaacaaataatatgccatgatccaaggtagatcaagggctgcctcaattttaattcccacttcaacgcgaggacgaccatccaatatgtgatcggattaaatcatatcacatattatactgctccgcgtactccgatccaatgattcaaagatgtatgaagtatggagtacaacacatgtgctcaggcatcgtccaagtcccacggagtatacggagtatacggtgagactcaagctcgcacgaacccatccatcgatctacacgcgatcgtcacaacccaaatcctgacatgagacagctcacgaaaatcaaagttgacacatcccatgggaacgagaaacacacatctcctccctcattaagcagggacgtcgttgggatcgacatgcacgttcccggtcgaggcccaaacgcccatgacagcgcagaagagaagacgcacacatacgtagcaagcgcctagcatgtatgtagggtgtacggagtaacggagcacagcacatgcatggtacttgcctatatagtcccaaggttgcatacttgcgcttgcacgcaacgaaatgtcagacgtcgatttcaccgctatatgacgggtcggatgcacgtatttggctactgaatggctaagtggggttgtatcgtcctcgcgaggaaatgagggtgaaaacggaatctgaaagcgtgaggtgcagcaacggggtttgcttgggcttcggttagcagataagtgacagggaggtccaaccgtaaggtagggagggggtgaaggtttccatggactgtgattcggtcgagatcgacgaaaagctgtaggctgtatgtatgtacgctgcacgactttgtcgagtgcgttttgttttagatcgacgagtcgtggtcgccggatatacggagtgctggatgctggggtttccaaggttgtgccagtggcttgcatatccgctgccccccctatgtgggactgggtcacggggttcgtatagtcttgtattttggacgtatagcatgcttgcttcttctagttttgctttttatgatgttgaggtacatcgtgcattctagatatggtcgcgtttgatatttattccctaatcttgtttctacccgccccttccccttttcattcgatgcgttggatatcacttttacaatatgagttctcagtcccctcactgacgtctccaatttagagctatgatggtagaacccacatcggatattgtacccaccgctgcaaagaagatggccgaagcccaagatcggcagtcaggtaagttttcggggtcatgtcaggaccccataattgtgttcttcgggcagctcgggaaatctaaaaacctccctaacagatctgtctactagttgtgttgtcggtacgatattttagtaatgcgatgtgattggaagagagttgcatctgtctcagttccaaccgcacttgattcagatatgtctcgatcggataaaagggccaataaataatattcagcatcccattattgcaaatgtttaatcatatgttcaaccccacatcgaaattaagtctggtatttattgcctcggggctgtcaaagggaaagaagtgccgaacataccccgggctcacgtggctggcacggagtaaaagtaaattccatgttattccagtgtcggcctttgacactgtgacttgcttcttccttattatagtagggtttggcagtgtagaattgtctacattgtaataagcccatgctacgtcgcactgtctgaacaattcttagagaagtgctacggggtttctacgacagcacagccagtcacgtgaccacatgacacgcgctagtcacgtggctacccgctactgctatttatgccaaagggggaaggagctgtgtctctattattaggtgtgtacgacgtcgatactggtaatataatggcagcatcaccgtattttgaattcatggcacggtggattgtagatatgtggactcaacggagggaccgaaaagctgaagtctaaatgagactccatgcagctgtcagttcacgtcatttggaatttattcacaaccttgaaagttaatacttcccacaattctagaaacgcaaaatccaatgcaacctcacctctcggtaaccgcgcggactgaactctaagcgctgccagaaagtcaaaaagaacagagaccgtggcaggaaccttgaaatgaggttgaggttcggtaacagaaggaaaagccaaaaatggggtcgatcttgacagcccgggtggagtacggagtacatgtactgttttagaataatatccactagtttacgagtctatcaatttggaattgattgaatgaatagtgcaaaccatggatcgcgtagccccagtctaaaaatcatgatttctctatcgaaatattttctgggtttagaagtagaaattgagagaaaaacaagttagagagatccaaatactttggatatctactccgtactttgcacacgtatccatatatgcatagagtaaatagaaagcaatctcagtccacaccggctcgcaataccgtggagatatcccccccgaagaaaaaaagtggtgccatgagtcgcaggtaaggcaagatccaggtttccacgggttgcgagccagactatggataggttagtcgcgatgatggagactaagtggagacgggttgcgcggtggacagctgagatctgctccgctccagtatctccgtgttgcttgacatttcagatcagtattggagcgatagaaccagagtataatggaaagtgaatgttatgatttgaaagtcgagtattcctctaaacgcctagtaatgcaattttcgcgggttttgtccagtggcactcatggaaatgcggtgtaacatggagggaaaaaacatgtagagcaaatcatagaaatggtgcgatggattgccaatgccataatttgccgtatacctcttgtgccggttgataataagttcccgcttggtaaacgcgaccaaagaaagggtatcaaaatataatgtctgaccaaagtctccgtaccggacggcaatgcgacatgtagagtgaactccagagacctggaaggtaaggaagaaagaaacaaagcaagacattaaaaaaaaacacatggaaaaagaaagtaaaaagccagtctatcaagctcgccgtatcctaccccgtgactcgtaaatggtagggagatataatataaaagcctcccagtcgtaaagtaaataaaacgctgacgttgcgaatgccgtgtaacgttgaagaatgaacagaaagagaaaaataaggccgtaatcgaagtcaaacccccagatgcaggttcatcgcactctagtgacgaggagagggaatgtgctcatcgacatcactaaaaggcgactgtcgttgagactccgtatccgcaccactgcgcatttggttccgcagcgcaggaagttgtcgtctccgagcattgataaaccagttactaatctgtccaaccaaagcattagcaagccataaagccaattaccagtccctagtcataaaagcactcacctgactgatcgaaagccccgtcctcgtcataaacatctgcttatcctcctcactgggataaggatgatcaagatgctcatggaaccaagcccgcagaatatccgtaacaggcttgggcaaattcccccgtctccgcttcgtcttaggatcaatcggatcacccataatcccgaaattcccctgcccatgccccatcatctgcggcgagatctgctcatcatacccgatagcaggatgtccgtacggcgactggggatgcatgatgggctgggtaaagtgctcgccgcggggatcagacatggctgccgtcggcgcgggctggcgatattcctgggcgatgaaggggtcggagcgtgggggccgctcagaatacccgctgctggcggacgggttcattgctcgaccgggcatggagtccaggtcgcggataggggggagaattgggctgggcccacgggatgcgttctcggatagatgcatgtggtggtggccgggatccggcatgcggggttggtggtctggcccgcgggagactgtgtattcgcggtgggattcgtaggggatttggttgggttggttgccatatgagattgagcgggggtcggccatttcgtggcttgagggtgggcggtcttgtgagtggcggggggtgtagaatggggaggtagattcgatttcatcgtggaggtgagcggggaggagctgagagaggttagatgttgattccatgttgtatttctaaaagcgctttagggtgatatcttacctctctgaatgaggggagggtttggtgagggtgtccggtcgacgactgggttgtatacgaaatagccatattggtatgttcgtctacctcatgggactgtgacatagacaaggtatttggggagggacaaggatagaagtgtccggatgagtttcacaatgtattacaaaatagaactatactcgacagttagaatggatatcagacgagtttgtagttcgaggcttcttcagcaaggtaaaagggaagaaggacgtatccaagaagcactcaccagggaaagcaggctgattttacgttgacatggtaaaataaaaaagagaaaggccaagattatatgcaaggttggggaatgagggtaaagatggaaatgcggtttctcaaataatgcagggccccgtacattatttcaaccaaaaaaaagtggccccgaaatctacattaaagtaaattcaaattaaattaaaataaaaagacatatccagctgttacatgtccatgggaaagtaagaacagggggggccgaaaaatgacgatcgtgggcttggtgggtacatgagtcggagagaccagcgctccgtgtgaagggcatgcggagcggagaagggggcgtaaatcaagagacaagtgcgggattcttaaggttgacagatagagtctttctttgagtctgtcaatggaatagtcttagcgtcaggatctatctcacgaactcctcccggttccatatagcgtaggttattgtaggagtcccgatgttgtgattggatgtttcggggtaaaggagtttgaggaatattgaaaatcgaataattaaattcaaaaagacgtggttcactagtgtacgtcaaattcgagatcccatgccaggccagtgcttataagcgggcagtattgccatttacatgagctggaaaagacaaggtccttgacacactaaggaagatggaacagtatacgattacggaggacttgaaagtacgaatgtataaaagaacaattaacagaaatatactccgtaccactacgtaggacaggttgcatgttcagacaggggcattcgtgcctgagtcaggccaagtgaagtatttgtctgtaattaatatattaaatcctcacctccactttgctttttctggggatttaagagattcagcactcggtacggactacggagtacggagtggttcgtggcgaaatcaaaaagggaacatccactaccatggaagaggaaataacaagcagaatcgagagcctttcgcgtaagacccaaaaagcgtcccaggtggatcttccagacaccgaatcgtaggaaaagatcgccgcttcaagcagaattgtcactggttccaaaaagatcgtgttccgagaagagcttaagccggtggggacgaaagacagacaggttctggatttagtttggacgaatcagaatccgcagaggtgacgcctcggatcgatcgtagattgcctgagcctctcatcggtgggcacggtggttgatcgaccaaccggaaagggagaggggctggtgctggcttacagggatagatcgcctaggggttcttcaatttgcatctccacttccttcgagagcttgtggcgtctagggcctttttttcggtctctttttggcatttctttcctgtcaccgtatgtcagatcaaggatcacccggagaacccgctttggtgttttccttttttttttcccccatcctgttttcacgatattatgcactgggctggtgagtgggtgttgatctgattggagtgaaaatacactcgcatatgatatctcccaggtgcgttgcattttagtcatttggattcgcatgtcaccgatcgtaaattgagatttgcgctaattaggactcgcgtatcgcgtccatacgatgtaatctggaccactatattctggagcagtttctcagcttgacacacacacggcactaacagacccgctctagcaactagtcacattctgagaattcaataatggcgcaaatctgtcatgtctggggatccctggactaagactaaatgcaagctgagtgtgctagtcagccaatcaacgcgggatgatggattcatctttttgggtgatttttgtgattgcacagcttcctaaaacaatctagaaagtaaactaaatgtactaaatgcaagactcatattgtgtcgtatatacatccaacccctattaacctgtcttcatctgacacccgagtctatttagttcaaagtttaataaaacctaacactgcagtcacctcgggccctaaggtaagtcctttgggcccagtcgatccacccatcaccaggaagatccctttcgaattaaataaattcaactatttcccgatcggaacggagcgcctcgaagctttggatctaccgagacttcactttgattcgccgttctgcagagatctggcatgaaaaatcggaactcgaaagtctaatttaatgaaagtctcaaaccgaggtcctccggactcagaaactaactaagaaacggagaaaaaagaaagaaattggcattctaaccgaccgtcatacctgccatgccctgagacccccattcacgagatcagagatcgtgcatgaaggaatgcagatcatcggatctcgcaggcaaccagggttgtccctggcgaaatgactgatctgaaatatggttattggtctaaagccgatccattagaggggagatagagagggtcgtttctctgcctcttgcatagtacggagaacggagtactatcggctcatatacctactccgtaccgtcggaggaattactccagattggtgggagcatataactacacatgcagtatttgtcatttccatttcccggttcttgggtctccggctattttattttattttatttctttttcccatttcggtctaaatttggctgtccaaccttatttgcatgattctgacatttgagcttccactttgtccattataaggattctaggtgtcattgccaagaattacttctagaaccaatttcctagcggcataaaactctgtagcatagtaacataataatacaaccttaggcatcccaaagggcccctctgcataaggccaacccgactacattggtactaactacatttctttcagcatgtaccctgtaggcctggacaattcagattgtttgctttttgcctgcccaaaacaacttagactcgtgtcaccggaggtgtatccatgcatgattccggtgtgccaagagtatagttcgtgatgaggccaccaatccttcgtcgccatgtaaggcgatattacttactcttttctctattggtccgatcaatactttactaatttacatgggtcttgctttttagaatgacgtaggtggggtcagaagtctcttgcttgaatgagttaggcacttaggcagtgcccggacttataattcctgtccccgtggagtagtatgacttgttgggtcgtttcgagggtgaaaggtaacgacaggagcccgggtgatcggtcggttatgcgtgagtgcctgactcgggactagagcctaccttgtttctttgtttgctttatgctcagttggcgtttgctacccttgtcggctaaattaaaattagaatcgacatctagcatcaccccgctcgattaggaaagactctaattatatgtgagatgtctacttcctgctacttcctaatgcagtatcattttcgttgagaatatatatcctcctgaatggttcaagccagaaggtcatgtacgagtatggagcagcgaggaagacatagcccactatcatatgtgagggatcgttttcgtacctccttcgatttggttcacaaggtcccagtttcggagacttagcaagactaatacaatttgagccacatgccaaacaaaagcgagggatacataaccgaagttcaagtgcttggattgtttcctatctaaagatgcacaaatgtggaattgcatctatatctgtcgtagtcgcaacaggaatttctgagcattcccacagcttcgaactgagagcgtcgctcacggtagtggaacttctttcggcttgcacttttgtgattactctgcgggcaattttctcctgttcaagcgtctccactagtcgtatgactctatttcgcatttagccctcgccatcggactgaagtctccagcctacgaagagtgaccccacagcgcatacccgagatattgcccggtttgttcctttgcctttccggttactgagcgcggcctgcgacatcgctgatatatctcgcttcgtctgatcaagcccaccagtgacatcaccaagtcctcccgatcgagatttcgcgcatatcccgtagtaaacatcgatgtgaacttgctgtagccaatttggaggcaaggagtgaacgtcgatatttcggttggctagtatcttttctcggttgacgtgggtagtcggtagagaaaggaacatgactggctcggtggctgatgtggacggcggcttcgccaggttattgtagggcacaagggtctcagcctaccaagcagcaattctaagctgccaaagggggataagaagcactgccgcacctcgacccctaccatgatatagcagtgtgactgttgacgccacaatgtataggaagatcatcgccgtcgacgtcttttgggcttctaaaaagaaggcgggaaagaggaggaagaatcaactgaatttttatttcgggatcctattatagtcccagaaagcaataaacaataaggtcttatctctgacctggagcaagcaccatatgatctcagcaacgtaaatttcgacctcgttgaagagcgataagtgtgttattagcatatctgcccaggactcatagcttgatactcaaggttctagtgtgcgtatcgaggcactttcggatcccgttcgactcgaaatttcatctagcacgtcccagagttgttgaccttcctgtgttgtgatatcagtaattataatgaggtctgggtgagcctcagatcgagtttgcacatcttggatggtggcttccacaatggagtaaaggagatcaagatgtgaagtattgggggttggagtcaaagcccttgcagaaattctgatgggaaggagttctgggtttattccgtgttgtgccattttgacagtaaggtgttgagaaagaaagtaggaaaaaattcattagatgacggatatgctaccgcctcatatatccagaagaaagatagccaataggagggcagcgattggtccataccatggttcacctgcgtagaccattgaatgcttaactttatttcttctatgtcacaggtatgatagattttaattgtatattcgactattatattgcctgaaggaaaggttttacaaattaaggagtactatgaagaaacggtagacaactcgacaattgtcaattgtcaattgtcttatcattataagaatacctcaatcaaatcgttgactttcacacaaggagatcaatcatagtccagcacagcagcgagggtgctagatactaaattaatgaagcttggggctgctcctgctgtggcacggagcaggacatcgctctcaccatgagttgctaggtcgcgcagccaactatccacactggcaacggatgtatcaatttgggagcgccattggtcataagtctcacactctgtgattgaggacacagcgttgattgcatcaatcaggggggagatgtagatcggtcgtgggcggtggctgcatggatggaggggctctggccgacacccttcaagcccaccatcgtaccaaaagctagggatacagacgggcaaatcaaacccggacgtatgaccctgcgcgcagatgagtcgtgggcggacgtacttccaataaccaggcccatggcgttttgatgtgtatgcatataagccgctcgctattgcgctcaatcccatcgcactaggagagcagatggtataccaacggagcgctgcaagaaaatgagtagcccaagctttgcccatatcgccattgagaaaaattgcggctcccctttggtccccagtcataccgtcataccctagatttggaatctgggccactgtctgcacgacgacagcaacatcgactactagcgtgccatcgcaagcgacaaaactgacgcctgctcgcagggccatcattgaatagaactcagagaagctagcctggtacccagtaggctggagattaccagcaccgcgggtcacgaaagtccacaaagtcgcgagaatatctgtctctgtatcggcagtgaacagcgatttagtagagccgagccaaggaatagtcgtgattggcggtgccctagcaccggaaacccgatcattgagccatgaacaccaggtgtccaaaattggtttgaccgaagaatgactggcgtagaagtaccagagtcctccgaacataacggtagcaaacacgtattcagcactagaaacgatagacgatttaggaattgtcgggcggtccgtggcggtgcgtataaggttgtccttggcgcccttgacagcgtttctcaagttaaaagccgacagcatgcagcttgaagctatctggcacaaatccttcggccccggggggcctgtctgcatattatcctcaatggactgtgacatagtgaacaccggggcttgtggtatgtcatatatacttgaagctggcggcaaattgcattgtggaggcgtcaatcgtacatcactggttgattcgaacactgaaatggcccggtctatgtaattgtcgagaaggggtataagcccttcagtggcaatctgtcgggggaaggctggatggcgggataggaactccagtccaagcggatcatcactgctgctaggcagtgatggttcaaaagaccaatcgctagaggcggcgaagtgtgcgaagaaagcaaccaagctgcgggcaaacagttcaccatctctgtcaccacacagatggttcatcactccaatcttcagcgttgatcgagaggcagtgctaaggaatttagcacctcaggaatattactgctgatgtctcaatttgctcacttttttcaaggttataatgatagggggcggtgatgaagttgtttatcaaacggaatgatgtttagtcccaagtatcggaatttggaatacttcccgacaggatttatcatatgagattatgatgaaatgaccataaacaatctttaatgactgccacacaaggggatggcaattgacaaaagattgtgcgtatgattcccacggagggaaatggacaggagagagaaaggagaacaaagaagagataagaaaggagagaactagctcactacatggtcctatcattagggacctgcgggcccaaaacgatctaactcatatgtagattagcatctggtgtgcaaggggttcgaacgagtggatgttaaatagttcgcacccccctgtaaagactagctactagcgggaaacacgcaatgggacagctgcagacatatctaggaagtattcagagaaattgccaaggggagaagcctggaaccactggggcttatggtaagttgatgagacaatagggaatcaggaagacagaggagtgtatgactagctctctatatgtagatactattactatgtatgacttgctgggtcttgtagctgactatttatactggcaacatgtatactaatgtaagagcgctttaatcagaagtcttacacttgcatgacctgtagagcctatatcgccggcgattggtgtcggtcctgtgtcgcttgcttctattgtgtctagatatatcataagccactggcctgaactatcgggcatctaccccaaattctgctgcctatctcaacagctcgccaagtcatttataaattcatgcacacagccatggtgaatcatcattggagaaaacctgtcttaaacaaaatccaataacggtatataaaataagcgcaacttcctgtgcgttggcggtgagccatgtcactgcccgatgatggccaacctgatgcaggggtgttgaaacggcccccgcctcttgagccactctacggggaaaaaatacatatagatagacttcattgtttttgcagtcagtttctctatttcctttctcagaagatgaacatcaaatggagggttgaccaggtgccctacacatgtcccttgtgacccgataagactgtctcactttgtttagctgcatagcttggcagggtatcagcccgtttacaaggctgagttcatgcggggagccctgttggctggaagaacgcggcttaaagaggactttttccccttttatttctttcctttctccttcttccctcgtcggttgctttttcatacaagctttttccaaaaacgaaatccatcatgcgtataagtttgtttctcgcaacggcgctagccgctctcgtaaccgcagatgaaaccaccagaatcaactatttcgggggcggaatggagtgggttcgtcaactgaacctccacccatggaccagcacagctgccagcgtcgctgggatcaatgccgtcgctaccacctacagaatcggatgtctgagcgatgcgccgaagtctgattgcgagatcgctacaccctggaccatgatccagggccccaaaacctacagtctcacgggtgtctataccgtgtcaggctcaggatcgatcaatgctgtgactggaacccacaacttcgattgtacttttgccaaggttaccgagtctccttcttgttcgtttagcgtgaaagtcaccggcaccactgcaggcgtttcctattcaacttccacctctacctccatcaaaaatatgccaacgcagtcctacacctcctacgggatcgatgtcacggccggaacagctttattcactgccagtcaggcaactaagactcccaatggggcagccgccatgattactgctgcgccaatgggggcagccgccgtcgtggcaattgctgctatgctttagtgatgggttgactctttgcacacgccgtccctattttaccctggccttttgggtagatctcattcgacgtctcaagaacaatgtttctttttttaagctgcctcagagtgcttaccactacaccgctactttccgtggagcagtcactcctcaatctcaaattgacggcatatgatgatagagaaatgggacaaaggaggcagtcaaattgggaaggtcctcattctggtcgcatgcattagctgacatgatgctagttgatggaataatagggtagagttgtcgggactccttgatgtagctgagactgtcccgaagagagcagcaaatacagcattacaatattgggacagtgtatggagaatgaatattcagatagaaacaaatattgatttatgcatgttcaactcaagactggaagaaagatcacaagggatgaaaccgaggaacaagaactgggataccaaaatataaacgaagataaaaacagataaccacctcgctaaaatgaacatgaatcggacaaagagcaaaatgatggaaggccagtcgacgacctggtcgagtgtgtctagccatggactcgtaacaggaaaaaacaaacaaccgcagagcttttacatgcgggcaggaacaaatatgtacaaaggaaagaccaatgttttttgcatatgattgtaatgagcacttagccatcaaggcataatgcgtcaagccaaccacgtataattgaagtgatcaccaagtttccttacagcaagtcagcatagcccataaacatcaaaacacatcaaaacttacagcaatatactgtccagcctccttcttccgctgccagaacatatcggcctcttgggcattgagattacccttggccatagcaacatcaataagggcagcctcaacaccctcacccatacctttacccgaaccacaaacaaagacacgaccatcaagcgagttgatcacaaaccaaacaagatcagcctggtgtctcacctcctcttgcacatagcgactctcgcccctacggctctgcacaacagtgcgcaccttgtcctcatgcacgccccactcgcccgagtaaagctcatcaaggagcgagtccctgacaccctgcagcacccagaccttattggcgcagttagccgactgcagacggcgctgcacgaagccgcggaaaggcgcaatgccaacacccgcaccgatgagcagcattggaccgtccgaggcaaaacgcgttgcaagcgggttcgccatcagtcctcggaacatgggtacgtggagatcgactttctcgccagaggcttcggcggcaatcgctcgccgtgcgagggactccaggaacccggaccctgcgcctgtgcgggacccaccgcgccagtcatcggattcggcgactgtgacggcgatctcaattaggcgtcggcattcggtgcctttgtaatggcaggagatctgggggtcttgggagagggagtagaaacggggcatgagggtgttgagaacggagagaagatggtcgagaggtggttgagagcttgagaaagcggttaggagttgggtgagggagacaaaagagcttgtgcgtaggtcacagaatgcaccttgaccttgggctgaggacagatattcgagaattttcttctcgtttggctcgcttgtgtactcggcgaggaggcggaagagtggctttgttggggcgtaactctggatgtcggagcaccagcttaggacttcgcgacgggtagtgatcagctcgcgaggcttgtcgtcgccccagattgtcggccagcggcctttggttgtgcgcataaggattttcttatcgcgcatagactttgggacacctaggaggttgaggacctcttcgacttcggagtccttgttcttggggcacacgccaattgcaccgccaactacaaagtcaaccatcccgctttcggcggggtagtcggtgacatcaatatcaaagtggtatgtacgtttctcggcaccaggccctgtcagctcacgggtgtggaatagaggcgcacggtagacctggtaaggtgggtgcggctgcacgaattccggcgggtggtctgcagggccaaaggtaagatcgactgccgatgccgggatcggcttgaatgaaacggtcttctctggaagcggggcaatgttggaaagttcactgtccatggtgaggagatcgaggttcaggttgaggctatcaaaggccttgttgccgacaggtccaacgatggaattgaagcctgagatcggtccatctacaggacgcaatgcctgtccccggcaacaacccccaccacagcagagggattgaagcttctgagtacctgctgtgcccacattccccaacacccttcgcatgtcgtccgagttctgggagacgaggacagtagatgctcgtcgcctttgccggacatcctcgaccttttcctctgcattttcatcctccgattgggactcggtgggtggagtcagagggctattgggagaattcgagccgctcgatgcagtgccctgggaggagcccgaggagatgacgttgaaattgatgtcggttaccgagagagaacgcacacctcgaggctcttctggaattgggttatctgggtgggaagtcgaggactttgggatttcctgataagtgcctctgcgggggcgggaccccgttgacgcataagtcgacgacggcatgatggattgaacggcatgaactaattcgatcagcatgtgagtctgggactgaattgggattggggtgtcctccacctacccatgacgaaattgagaggagtgttgggagtcaccgaaaagttgtacaaaagtcggcgcaatgagggaagaccggggtatatgagtcgagacgtgacgatggcaaggggatgtagtagaacccccttttttctctttctatgaatagagcatggaaacagaatagtgggatgagggaagagaaagcggatccgaagaattggtcgggacgatagttccgtaaagagaatcgggaaaatcgaaaatgacggtatgggaatgagaaatacagggtctcacagcgttgaagatcggaaacagaacagggattttatcagattcgccacattcctcgtcaccagtatgttacgcggttggttccggccttgatcgtttacatgtaaatagagctcgaatataagatctcgacttatcgttgatatcgaatgtcagcagtaatcaggactcgactactggatatggtaccggctccatttggggtcattgtatccatccagatcgacggtgcatatgaaggtgcacttgtactttccccgtattcggtggcggaaaccgccgagagattcccagttggctgctaccatattcaaatgtcatatgatatagacatatcttacgttgaccaaggggattctacacgggtgttttgaattcgcacaagaaaatgcaagttccggggtgggccgacaggaaatgttgaattggaacaggtgtaatgtatgtaacgtgacagtaccatacatgatacctcggttatcagatcaatcagatagcaaacagcggattccaatgtccgagtatgtaatcatatcccatctgataacccaacgtgtctcgacgctctccacatgatgtgtgttctatttgcaaaggggcactgattgcaatcaaaatcccctgagtccaagcctcgaggccccgtctttacaaaataccaaatggatctcgctctatagactcccccactttccgaccagccggacctaccggtagagttatgtatcccgttggcccatcacagctctcatagcttacacgtcccttaccctcggtaaaccaatttcccaaccatccggtccaatgtggggatgccaggccgagatcaatcagtgggtcggattttgaacgagctagggatgttctagaaaaccagtgaaacagatcacccctggagctttcaggctgaaaggttcactgataggctggtcgattcaataataacataactgaagccactccctaccggaatcagctgattcttttgtgcatatgtagcccgtctcccgggcttttagtgttttcaccaagtctctattctatactagtggcactgcattcgcgatcttgcatcagtccattcgacattctttgtcacgtcgggtaggaaggctagggtttgcgtacaaagtacggagtactccgtactccgtagtcacgcgggttataaagcgtttgagttatagggggaagaaaccttagaagggctaacaggttccatctgataacttaattttaatgccgatggccggctggacttccgagagacctcctaatcgagtaactatcatcacagataggggtgtgtaccacgtcattattatacgatgttggtctgtttgaagacgaatgaaataatgataatcgataataacagcagaatcccaagaccgtacctacagtatatacggagtacgtcacgtcatcacgtcatctctagcatccaaacataaacagaaaaataataacagaaaagaaaacaaatcctccagcccaaccaaacactctaactattttcatcccgctggaccaaagccacaggcggaataaaatgatgtcttccccgaaccaaataataaatagtcgcagatccaatgatgccaacatacatcgccacgctccagttcattgtttcagccgtaacatccgtcgacagagggaaaaacgcaaagataaagatcggacacaggaacgccaacgctccaagattcactgccatgccaaatttcccaagtgaccaccggtggtgtgggagcggctcgccccgaatgcgttttaagaatacgcacccgatcgagatgatataagcggataaaagggatgtgatggtgagcgagatgacggcattcagggcgacctctgatccgatgttgatcatcgatagtagtactgtgataactagagataccatcacggagttgagggggatgttccagcctggtgtgacctggttatctgttaatactgctggacttacacctcttattaggatgtagaagacgtggcttacatatgcgaaaaaggacgaaaagggcagcccctcgtcccgggcaaacgaccagagctggcgcgatgccgtcgccacttcggtgattgtgctggcggtcagcgtcaccaccagcacggcagtcatggcgtttgtcgcggcgatgctacccgtggtgttgtagaatatctggataaatgggaatctggtgggggtatcgaggactctgtcgacctcgcctagggtgaagcacagtgtgatcaacataatgaaccccaacacgccattaacggcgacagaggacatcattgccttagggagtgtctctgatgcgtctttaatttcttcggcttttgaatgtcagcatgatataccatgtctgtgatcattcgtggagttcttccttacacatatgaaccgagcaatcataaccaagcatggatgttatggtagtggacaagccgaccattgttgccgtcccagggctatcccagccgcccccattgttaaacgtggtgaagactgcgtgggcattgttgcgtggtgcgagtacccacaacgggatgatgatagcgaacaaaccaacaacatgaatgatcaaaatcagtccttccacgaagggaagattcttggctaagaaggtgttgaataagattgagaatgtcgaaatggcaattactagcatggtgccatgccatcgctggaagttatagtctggctggtttaagacgatcaggccttgaatgattgtgccagcaaggtaggcgatggatacaatggcgcattgccaccccattgcagaaagccatcctgagataatatgatatgttagctggttagacttacacaggaactggctatgttacctgtgatatagctgaggtatttttgtcctctctttggtgcgaactccgacacccaatggtactgtccaccagcagtgggagccctatttatcaattgattagcggtgatttgtgaagaagcagcaagccgacagtcacctacatcgaggccatctcagcaatgctggcgtagacaagtgtaaaccccaatgtgacgctgatgaacccccatatcaagcccgcggtacccccatcggtcaagccagccgccaacaatctattaatggagtcagtagtctgcataattatcatatgcagggactcgcacatacgtcaagataacttcccatgtgcagatcaaagtgcatccaaatcctacaatagaaataaaccgaaagtttctctttgtgatgttaacacagccggaacaaaaagagtagagctacttactcgtagaacctgcactcgacctagagcattcatatcacgcttatccgccagcgtgcccatatactgaggctcaacaaggcctttctccgcgtactcctcgtcgtcaaggccagtcatcgtctgctgtgagtcaggtctggatctgctgatgactgtcatgattgcgggcgtggctgaacgattaaatgtaatctattgaagatgagacaagaaaattctccgtagaaatataggggattgcgagaataagaatgaaagtcaatatcttctggcaactcgacgccccgggggatctagggtacaaaagtgccaatgacaaaagcaccctctaatgaagcgaacaaaaatgaatgtaaccagaagaagaaggtattaggagaaagcccgaaggactagaatcatgacggccactgaatttcggggattgaagcgtggtattgacgtgggagcaaggcatggcctaaggaaaattctcgtgcaccatgtgggagagcacatctcctcggaacacccaagcagcgatccgaatgatacatcgttctttgccaaatggtgatgcatctaattcgatcgggaatgggactgttgaaactagtttttggagtttgctatcccttgtctgttgcccggaatggggctattgcgaccttgcatgccaggggttgaataatacctgtaatcttggaagatattggggtttggactgactgtcggggttgtaatgccactctaaaaacttctaatacttctatatatctctatcactgttgtatataaaccataacttgtttgaagaacacacttaccgaaattgtagccgatacaaagtacgaaatataaacaaacctaaccccttcggtaccgctgcccgacacatttctgatgtatcatctgcgctagccatctagacctattaatccctgtcgcacgtccctcattgcttatcccccagacaattccgccacactccatgcctagctcgaaccaaataacgggtggatgcatgaacccctcgctttatttgcccaagagaaaaccgcatggcctatcggatcacaacctcctaaagacccacagcctaatcccgaaggggcgcacgatgatcgacaaccctacagcggaccgccgtgccctaaacgcatgttcgcagtacggataactccgtactacatcgaagttcgacgtgagggagagaagtaaaatcaccattccaactgaccttcgcttaaaccaaaaatgataattgccaccatttatatcctataacgaaagaaagggataaaccagccataaggctttcggatacacctacagcatccgcccacatcgagcgaatcccaccagccctatttacgtacatgcctgaactcgatagtctatcttttttatcggatatcggcatatgacctacgaaggcagaacaatcataatcccaagtgagtgggagaaatggaacctagcttaacctttattgcctcgccttgacgcccgcatacctcctgcttgtgcttttctatacaacgtatacaagcgtctcaaatcgaaccccttcttccgcagtaatttacatcccgccattcagtgcacatggctcccggatctgacagcctttcacagtcgcttctgtgtctgtgttgatcagcgaatcccatatatacattccacatactatcaccacagtatatccttccctccacatgacatagatcataaccacgagaagggtacttttgagattatatcgtttgcggcggctcctgcttcctcccctgccatgggcccatatgtgccgccaggccagtcgccacccttcgaggtcgtcgatgacttacatcatggcgcatgggtgataattaccgccgcgctgggactggtcgtatctctcgcatgtttcttgattcggctatatgtgcggctcatgctgattccgccgtttgcgcgcgacgattggattttgttgggtgctacagtgagttagggcttgacaagtcgagtcaagtttggggtgggagaattatctgagcacgtaccctgctgacatattatttttacttgttgtataggctaccgctgtggtacaatcaagtctcatcttttatgcgtgctcgcgcgggttcgggacttctatatcgttattgaaggatggtcgactcgatcagatccaggcagtaagttgtttgaattctactacttcaatggacctaaactgagcagctacgaagttaattgcagcaagcgatatcatcgcgctgataataatttacctctccaaatgctgtgtcgtggctatctacctccgcctcacgcctcagaaaccacataaccgcgcatcctgggcgacattagctctgtgcactgcctgggttatccctgctatattcatcgtcctagttaactgtgagctaaacacaccttggcggagtgatggtgggcaatgcaacgacttggtacgtaaaccccatgatataccacgcatcagctccccgaagccgtttctcacctcgcaacaatagtacatacgatggcaattcatcgcagcagtcgatgttataactgagctccttctcttcatcttagccgtggtcctcctaaaaggcctatttatgtccgttcgccgcaaactagccgtcggcttcgcatttatattccgctttccgtgagtaatctacattcaccccatcctcaacctcaaatccaagactaaccgcctaaatcaagcctcataatattctccttaatccacatctcaaccctccacacggccctaaagagcaaagatacaaccctcgccgccgtcaacccaacagtctggatgcaagtcgagctccagtacgccctagtcgcatgcagcgtattctgtctgcgacccttcatggcagccgttagcactaactacggtacggcgggtgactcaacgctggaaggtagcgcgtcgagatcaaacggaacaagagaaggctcgaagaccggatctgggtcgggctcgaatccaaataccgcttcgaggtctgtgtcacattctcgcatgcagaggaaaagagttggtacagggtcaaggctgccaccggttcctccggccgttagttctcaatcgcaacagtcagagaatcatggccctggtcagggcgctccattgtgtcttaataccagtacccatgcgcacagagcgcttggaaataatacaagagatgggtatagtggcagctcagatacagtttgcccaccagtgcgtcggtcaatgttcccgctcagcgcgccgcgcaagaagttgagctttcagatgctggataaagggaagaatgggataagggctgggtctgggggtttgtttacggatgagtcggatttgattgagcttatgccgaggtcgcatactcggcatgcgagcgatgcgactgagctagaggatgaggagggggcggataagatggttattcataaggagattcggtattcgattcaatatgaggatgaggatgaggctgagttaaggaggcgggaggatttgaagattaattctgttgatgttactgcttatgtataattatatctctatattatgccttcttgtaggatgtgtggatgtgggatattaaagggaagttgtacacaaagtttcaatattataacgcttcagttgttggtcgcttgaaaggatgggcttcagtgctcctaaaaagaaaagtgttagctcatgaagatagtataaacacagctggccgcaaacgtacagcacatagtcgtccagactgatatgatctggctcagaaaagatgagatagaggtacttcaaagtttcggcaagccaaaaactctccattttgtcctcatgtttcggtttcaaatgacgcacatcgttaatagacgaatgaccaaatttagttcgggtcgccttgtcgatattcttgaacatgcgccacgcggagtcttgaagagtcttatctccagtaatccggtacatgacgaatagagactcaagagcttcaggtctggatgaggcgtatgttagtgggctgcactgggaggaatgggataaattcgtacctgagtttatacgatgcgtctcggacactagtcacaccgggtggcagacgctcaacctcgatctggacctccgctttttcgcggtcctcctcggtatcgatagagtgcgatatgacatctgacatccactgctcttcatcccacggacattcatcaatgtgctggcaaggactgactctgaaaacctccggcataattcctgaaggcataacatcatatgcccagacgcagccgtcggtaagtccccgagcaacatacatatcctccggtcgattgaaaaccttagctccaatagccacggtgccacccatgaagcacttgaggtggtcaggcgcgtactggaaggtcttcgagtcaccccgtagtgcgacgacgttagccgtaaagagaaagtgttggtcctcatcctgggtcattcctctgaacagcagattctcgttgaatgtttcaatggccttttcgtacattcggtgatatttgtctgtctgtccacctaggagaatatgttccttgggcaagtattcgtacgcggaatcggcacatccaccgatagtgaattcggagtcgtcgaatgtcattaggtcggtgttaatccaggtcggccacatgccaggcatccgggtcttgtcttgtccgatttcgagctcgttcatgatccgctgcacggcatcgtagtacttgggatcaccggtcaattgggtcaggcgagtgaactccatcgtcaaggagcccatttccgctaagcttgtacgtgatgatggtgtaatttctttgccttgggcggatctagatattgtcagtcacaaattctccttgcgtattattttctatttgggcataccttatccattcccaacgcacttggggcatgcgattatgcgtatcaaacgcattgaagatcatctcgcctagttcgacagcctttctcagcaggataggatgtttgccctcggtcagatcatgagcagcaataaagccacccatatagcgaatgatgatctcaaagacaggcacctgcctgctcttggtcgttgtaaagtcgatttcctccagagcttccagagccagctggagctcatcgtccagtcccataatcaccagcgcatctagcgaatcaacaagcgtggcaccccatccattaaaggtatcctggtaccctccagtgcgaggtttcacctcgtctcgcatccacgcataatccttatatccattccatgaatgaagaaacgcctccttcacagcatcccgcttcttgagtctggccttgcgctcaccgtgggtttcttcagggaagtcatgctgtatgcggggaattttcgctgaacttgttggtagcggtatgtactctgtaacagggaatcgctcggtgactttatctagacggatagcatcatgccgaatagtgctgtcttttctggagattggctttgctagacgacctcggcatgtttttgtactagggagccagaagaggaaaacgtatgtcgcgacaatcagaaacaacgctgttgacaaaggtcgatttttgcgcttgttgtacataataaatgaatggaatagggagatttcaaaataacccaagagacaacaaaggaatagtcataggaagcctagagaaggagtggaatgatgtacaagtcaagtcaagtagggaccagtagcaaatgccggcatgtctcagtgaacaagatcctgatacataattagagcaaacaaaggaggaaacatattttacaaaaggtggcacgtcatggattgtgagaggtctctagggaatcagacacggtttggagctccattgatcgtccctggtggcttttggaagttaatgcgaggtatgatcttggagagcatcgaatgatcattggcgcaattcgagaatgtcacccccttcacacctggccacgcaacaagggaagactgcagggtccaatctgtagagttattaatagagtaatatcaatggtcaagtctagactggtgagaaaagcgccaagacggtttttacgtctctctgctcagcgccaccaaccccaccgcggcccctgactgtccctgatagagtagttaggtaagggttgatcttgacgattttcagactggaagatcggacaataacacattgtgggtctgaaagctgtgctttggtatgcatatgtaccctgcctactggggcttcctatctcagctgtcgccacttttagggcactcagagtcaggttcaagtaaagttcaattagggcaggtagcccggggtcgtgaattagattacataatttattcattcataaccagccatcacgtgatgaaccagtgaggtgctcactaaaccctcaccctcaccataattacccaacggagtactttgtttattttgcgataattcgttgattgccctcacttctcaccatactctgaccacccatatggacgggactcaaggcccaaaaggcggagcactccagagtttataccttccctatttgtcgtttccttttcttcacgcttcaaccgactttccccctcaagtcccgcaagaatagcgtctctaaaaactgatggcttcgcaggcccagatctttctcttcctgaagccgtttctcgtaccataccttccttatattctatcccaaacagtcttccagatggatacgtcgtcaaccactcccgtttcgagttgctgcgcgcctgtgccaaaaatcttatcgagtcccttcagtcaaggtcagaaaaccagtggcttgtcattatcggcttatcccgatcagatatacacaaaaactcgatgaagaccacagttgtttggggggatgggttataggtttacatgggaaggacatgctgggctcatcaagatagtcccctccttcgagcgcaattcggtcgtggatgggcccaccagggtactggatctcgacttctaggcgagaagggcattctgaaagtcgacatggtgactttctcccttgttctaagggatagtacttttgtgtcttggtagatccggtatgagattgagcggtatgtcacttggctgtgtaggacctgtaagaataatatgccgaccttcggttcttgacgaggaagaaatggaaaaacgcactatcggaagcttcagtaccgtgtctagtggcttggacatgacttggatctctaatggtacccgccaggcaattccaagaacgtgccagataagaccacagatttgtgtcgacaaccagcagaaagtgggtagctaccacgacatacaagctgaccagggattccttcagccatctcgccgccctcccggctgaccaacactcaccgttgagatggggctttcagaatcgttatctcagctcagatgaaatgccctatagtggctatctaactcttccggtgaggttcgaatcgtcttgattatctctatgttaaaaaaaaagataagagtttccattgaaaaatggtaactagcactaccgaatagtccacgccccctcgagagaaggcatacattcaaaccctataccaatagatccgaagatccctcggctaatccaacagcaagtagtatcgcagtaagcgtactgtgcacgaggtcgaggtttccactggtagcatgtctggtacagtttcccatttattacagtgtatgatagaccaccggcataaggggagggagacattgtccttaccgcgcaggattttctagatttcaccagtgatctgatttaatattgcggtggtttgctttttgggagccctggatatattcgctatacttctccataccccttttttcgtttcattaccaattgaatctgtcacacgacaggaaaatgaatgcataatatactttgctttcagaaaattctctagattctgcgcagacgtatattattaggcttctaataccttgcaatatcataataaaaaaagaataataaaaggattcggttcatccgaggaggttgaaatatgtacactagatgtttgctttgtttgcacttcaatgctatcatgcaggctttcatctacaggctgctccgtacttgattctccataacaacctcgtatacatataaattgtccaaaggtaccagtttattcctattttcaatgtttatactaatcaatatatagattgaactcccgtcctgtttaggaatcatcttttggcattcctctggcactggacttgatcatcattgctattgatcgatctctatatctatattgcatggtcgctacctgctacagattcccaaatcaatccttcaacaggacttaagactatctgggaacctatcgccgcatcaatttcccaattgatatccctcagctcaacactgctgtggccattagtcccatctcttcctctgcacctgcccggaaaacaaacataaaaatgcctatcacagggtaaatatactccatatccaatagaaacacgcaaaactaacaccccaaagcgtctacttgatcccctcaaacccaaacgcctcaacagccctccaaataataacagagcgtctgcgcgccgccttcccaaatgaagaactaatcccaatcggccgctggggcctagagcaaaagctcctacgcgacaccccaggtctactcccctcttcaaactcaaacaagaaaccctcaaacccacgctacatgcaattcctctccttaacccactacccaactcacggcttcatctacacctcggagcccgagaagcccatcccagcaccaaaccaaaatcaaacccaaggcgcgcctggccccgtaaatgccatcgcgccagaccactccgcctccccgccaatgatcatgacgactgtccccccttcctcatacggaaccctcttccagcacttcacctacgcttgtcagccattctggagccatcggctcaccctcactgtcccgaacgggatcgtctacgaggttggtgacttccgcgtgcgtcttggtgatgtccggcagacgttcccgacggcgcgagtgcgtggtaccgttgttgagattgagtggcgtggtccgtcggttgtagaggccattcccgtagatcgggaggatgggtcatttggtgctggtgttgatgctgggggtgagggtgatgtggacgttgaaactgccgggatcaacctcgatagctctgcaattgaggagtccgacatcgatgccgagtatgcggcgactgcgtcgttgattcgggagttttgggggagattgggtgttgaggctcgggaggcgattcttattccgaacgttgggatggaggttaaggatcggctgaggaggtggaagaaggctgagtcgtctggcattgacgctaggattgatagtagagttgatggggctagctctgtaattggcgagcgtgccgaggaagatcctaatccgtggtctggggcggatgttgcgaggcagtttatggaggttttgagatttaatcgatagctgggtgtttatggtggcggttggtatgatggttatttcttatacgcttgctactgtgttttgtggacattggctggttggaacaagtctcgcactataggacatagggatggagccatcattcctatattatgaagactcgacccaaagtaccgccagtccattccgtctgcatttcaaagcgcacgcttgatcgtaaatcatccaagatgtatagcctagtgagcatagactacaggaaatcggtattggaaaattgaaatgtaagagaaacactctcgttaaaaaccgcgacgtcagctaacatggaaaaaggcgcacggtgaaatgtgtcgcttatttttgcatcatgagctgaacgaactcgttgtctgtatggagagggagaggttagcatttgggcaggcaagtgccggtaggctccaagattgtttccaaacatacagtcgattcggccatcaccatcctggtccgcctcgcggatcatctcgtccacctcgtcgtcagtcagcttctcgccgatggaggtcatgacgtggcgaagctcggcagcggaaatgaacccgttgttatcacgatcgaagaccttgaatgcctcgcgaatctcctcctcggaatcggtgtccttcatcttacgagccatcatagtgaggaattctaccgcacgtcagtagccgtctctcgtttataccaggaggttatggtcaaataccggggaagtcaatagtgccgttgttgtcggcgtcaacctcgttgatcatatcctgcaactcagactcggaggggttctggcccagcgagcgcatgacggtgccaagctccttggtggtgatttgtcctattagtaggattgtatgttagaatacttttctcgtgaaattcgatcgcagaggacactgagctgtcgggcgcgaccacacgtaccatcgccatccttgtcctatttcgcaatcaaaccaactccggtcagcatattttcgactatcaagtcttcaatctgtatggtgagtcactcacaaacagggagaaggcctccttgtactcagacacttgctcttcggtgagggaatcagcctggagaatgcgatggtcagtgaagttcaaatgaaatgccccgcaatgtgggggttgaattttcgacaacacaactgagaagttaggggatcagggacataccatgatgaatgtagatggaaaatacaacaaagtaaggaggggtcaagtgaagaagagggttaaggggaatagccttacaagagttaccaaaatagcgtgcctgaggtgcccagtcagcgtcgtttcatcttagggcggtgggacccctctctggggctgaatgttgccacaattggaagttggaatgcatgttcaggtcatttttatatatattcttggcttatttcatatatctaaatatctgttgaaatactgtttatcatcgccttacttcctgtatgctcatgcggatgtaacggacagaaagcttgatcccggggttccagggctacgttgagcgggctaacagtactataccgaatcgacgtggaatggagccaaattgcttaggggggtcttggctattatttgtttggggatttctgtttatcctacttaatagagtgtaactgcggggtggatgtatagatctagaagtaaacactgcaagacgtcctatattaattgaataaagcgatgtgttcttcaactataagccttcgacaatgccctatttctacctatttaggctcaaaacccggggtttccatgtcactcaattgagcacgcgactcatagtaaagcgatttgcagtgattggcacaataacactcaagacctcagtgtcttttgatagcaaatatgtccaggtcaagctgtcttcacagtttacccagccataccaaaattaccacaactccacgtggacaaaaccaagggttacatggtgaataccgggcatacgtgaccccttccgacatgtggagagctcctatcattcacttccggctatatcgagaccccaatctccctttgatcccagtctatcaccccccagctgatcatgattccataacctcaccaaattaataaactgacataacccgatcctacgaacgccctcacaatgtggcgggatcgaaccaacctgtatgcatccccatgtaccctaccctacccaagcgcaacccgtcatcgccggacagagccaaaaaaaaagaaaagaaacaccacccataaaactcagcctataaagcataccagcaactaacactccacctccaaatccagctacctctcctaccgccaatccctaatccaccacccagctaaaaagccacacttcacaccaaccaatggcttctccgacacaccctcgcacccggaggaaaataggcgcctaatatccgaaacagacgaagatggcgacatggtcattgaaatggacctcttaccgccgcgctgggtcgacgtgcaggaagaggtctccgagcagttagccgagattgcccagaactccgcccagctggacaagctgcaccagaaacacctgctccccggcttcggcgacgaggacctgcgcaagcaagacgagggcgttattgagcgcttgacgcaggatgtcacgcgctcctttcatgattgccagcgcgctatcatgcgcatcgagactatggtcggcgagtctaaggcgcatgggggtgttacgagtggggaagagactatggcgaagaatattcagatttcacttgctgcgagggtgcaggaggctagtgctaggtttaggaagaagcagagtacttatttgcggagtatgagacccttctttctttttgtgttcttgttcttgttctcttcccggtgaaggccgaatcggttggttccatgtgctgatttgtctctgtccagaattgcgagatctcgagggtatcgcgacaccgttcgatggcacggctacgcagacccagaacccatacacggatccgtcgatgatggagtcagatgccgacagatccttttcgcagaacatgttacagcagacttcacaacggcagaccggtcagaatgatgctgctatcgcacagcgggagcgcgagatcaatgatattgcaaaggggattatcgagctttcggatattttccgtgaactgcagagcatgattatcgaccagggaaccatgctagaccgtatagattacaacgtcgagcgaatgggtaccgaggttaaggctgcggataaggagcttaaagtggtatgttccttctttactagcaacttccccccccagagcgaggaactgacttatataggctacgagttatcaacaacgaaccactaagcgtaaggtcatgctattactcctgttgatcgtcgtgggaatgataattgtactggttgtgaaaccaaaggggaagtcttccccgccgccgcctccggaggatgaatcttcgaacaatatccgctccgtgttggcttaccgggggcgaagacatcagttgtcgaaccgcttcgcgcgagatcgatggatggatccggatatattccgatgatgtttctttttttaatagcattggttcatagttaatgtgaccagaagagcagacgttccctttgcatattggtagttgctgtacaacatagctgcttagttttagagtaaataggcaatggatatggagatgctagatctcacgcaagacacttacttgcactgggaaaattcgaaaattggactacagacctgtagatcaatgccaggttacattatacatttaattacttcatacacgagataaatgatatcgaacataagccgattgaatagaaaagaaatgaataaatcacacgaaacggcgcgatgcacataaattaccagggtaacatatggcctcgatcataatacttcaagctcactcaccgattaccctgggtcgcaagcagatcagctacatcggaatctagatcgccggctgcaaaagccgcatagtcctcctcaccatgggagatcttgcgcctctttgcatggacatcggcagcgacatcgaagtcattgccatggttcggagaaatggtagtgggttggtcggagacggcagtcccgttgcctgactgctgcatgttggcggtgttcgtagggttccattctgagacatcgtcgtctgcctcttcggtaaaagggccgcggcgaagctgctgctttcctggttgtggggatcccactggcgtaatagcctccaccgggggaggtgtcaaagcttcgactgttgggcgggcgggtgcatcatcgtgtccgttgtattcaccagggtttgtggaggactcttcactgggcagaccgcgcataatcgcatcttcgacctcgcgcttcttggtatcggccgaggctttcttctgtgaaagctcggcgctaatggcctcttctttcgatagctctgcacgattggtctgcaggatcttctcgagcccatcgatcaaggcgtggcgcgacttgattacttcagagagagagttttctgcgttggcgagtgtcttcaagagtgaacttagacgcgcagcgtgaacgggcagtgtagccttaggagttttggggtcatgaagcttgtcgaattccgaagtagcggttgctgcggaattgtgggagttgatgacagccttgttgagagcaacctgcaacgggttgagaggctgcagttcggacggggaggatcccgaagaagtgtccttgaagaaagatcctccgagggtttgcttcttgtttgtaggacgagctttgtcgagttctgcaacatgatcagtttagatagtgcatcctcgtgtctattgattcgacctaccgtctatgcgagcttccactgcatccaaaataaccccgtcaaatacattgcgttgtctccagacctccacgactcggcggatcctttgctggtattcattcgaggagcccttgtaagcagctgacgtagcatcgacgatgatctattgttctgttagtttgagttgcgatcgtggactggcagggagacgaaccggagatagcgcaatgaggaaatcattttttccgcgtactttagattgctgggccacctctatagatatgattagcaagcggagtgcggctcatgtgtggaggacatgttgtaccattggctaggtagatcaggttgagtcgcttgggaggcggcgagtcgcggatcttttgaagccagatctgtccagtccgttcagcatggcgtctagagttacagacaaaagaattagcaagtctctttgaggctggaacaagtgtctgtacctgtggaacatgacccattgcgcaacagtaacgatgctctcctgcgtgtcattcagagccgatagctttgctttgacagcgtcatcagtgaaagccatgatgacaaaaatagtaagcacttgttttattgaacagcaagcttttgagaagtgaaattatcagatctgaagtgcaagtcgcaatcgctgttagagacaaatagacaacgagtagaaattggagaccactggagagatttggaaccgcgttgagtggcaatcaagtaaagccaccgaaataaagtcaaaggaatatcaaacgaaaatctgaactctcaacctttctcatcacaagtgaagttgacatcaagtggtttgtaccccaagcttgagacatggataagcttaccgccccggatccggcagaacaacgggcctccgagcccgcccaggccacacctgtcaacactacttcctataactatctacttcctggtcctttgatttcttctccttacgaccatcttcttgattcaaacgtctttattgagtcatacaacagtcaaatacaatccattcccagcatggctgaccgtttcccttccctagaggacttctctgagggtatgctcaacccgccttacttgctctccttacaccggagctaacatgacccgcatttaggtcaaaccgaagtagccgatatccaagccaccaccgatgacgatttccttgctcgcgagcgtgctgtgctcggtgaagacgccgagcaattcgctacttctcaagaccacgttgccgacgggaatgtaggcgcgggggatgatgacctgctcggtgcaggtgacgaacccgttgaggagattggccaatttgaatcagcattcccctctgtagcgacgcagaacctgaatgaggtacgaattggctattggatacatggtggtggacatgcagtatgctgaccaggggttacatctatgcagcgcgttgctcccggcggcacaatcactggctccggctcacccttcccccgtaccggatatcagagcgcacaggaacccgaagatgagggagatgccgttcggtgagtccaatctcaaactctggatgatggggcgcattgcctttgcgatctgcatccatcctgtctcggcccggatcccccaagctaacttctgtctttgaattctcagcgaatggcgcgaaaagcgtgattctgagattgcccgccgtgccgaggtctccgccgagaagaaggacagtactgtcaaaaaggcacaggaggatattgacgacttctacgtttcctacaacaataaggccgataagaaccgctcccacgcccgcgccgaggccgaacagttcctcgccaaccgggaggacacctccgccggaggcaccagctgggagcgcattgctaagctggttgatgtatcgggcaagggctccgcgggcggtgccagcggctccggaaaggagcgtttccgtgaattgttgatcgacctccgaaaagaccaggaggctcctggctccagcggaatctaggtggtttgctttggcgtgtgggggatagaagattcgggggtccggggttaagacatggttcacaagtttcccacatttactcatctgatatggctttttctacatccccctccccgcattatttggtagccttgccgtgatttgggcgctacgtctcttattctctttttattttattttactccacgcagcgaagtctctaggggggtttgtaaattagtatctcgctgaaattgatagcatcgttaataccacagatttcattctccggccgattcgtgccgagtagatatctttattacacgcttaatagtacaatacggatgtacaccaatcatggaaatagttggacaaccagttctcggatcaagagaaataaatgcatacttaattcatatcatcgtcgcttttgaagcatccttagtcaagctcggtaatatcaccaccgggctcaccaacttcctgctttccctcttcttccaactccttcagtttcttctggccctctgctgtcgtggcgtcgacgattccttcctccaagctgagcatgccgccattgcccaattgctccacaacgacctctgcctcctcgacagacatcttgccgagaaccttgttgacttcgtccaaggactcggttgccagtgccttttgcaggtcttcagggaaagcgtcgaagatcttgcgtacctcaatctcagttggatcttcgctattagcggcaggaatgttgatagtgatcttggtgttggggtcaacagcgtgcagctggatttgctctacgcccgcaggatcgttggatgctgagccatccttgctgagttcagcggagcgggatttgatacgagcgtaagtatcattgacatcattaaggaatagggtggatgcgcggtgatccttggtggtgatgctagaagttcatatgttagccattgaccggggaaaaaaaatagctaggaggttgatataccgagtgaagaacagctggatgccgtcacgaccgagcgagcggcagtattgcagaagtagaccttggtgcacgcactggcgagcataggcgtcttgacccttgagctgactgttgaatgcctcaacaagtagtccgtcggtctctttctcggcgacaatttcggggttcgctgagatgaactgaagacaggccttgtagtctccaggcttgagctgagcgaacttctttgcaagcggactaatctcgatatcggcaggatcatcatcgtcgccttcatcgtcagccttggcggcggagcttcccgcaccagggttcaggagctcaacagagctctcctttggtttggcagccgccttcttcttttcatcagccttggccacatgtgattggttgaaaccttcgtgtagctgatcactggtgatcttagcgccttcctccttctcaagttgcgcaagctttgcaaacaattccttttggagtccttgaatcttttctaagtgtccattcacaccctgaatgtatgccttgaagagattgtcaggcttagaatcaccaatttccttcttcacctgatccaccagtgagctcatcatctgggaaaatttgggctgttccggttcgtgtgtgtatactccctccggcggggtgggggcctggtcttcggcggggttgcttgcgaactccataattgttgtgaaaatgaactcatcaggggaagcagacgagtcctcatgcttcttgagagactcaagaagcttatcgatgcgtgacagcaatccatcattgataatgcgctcgtacttcagggttttgatttcatggcgacgttgctctcgttgctggtgaatctgggcctgctttgctcggatgaaagaacgtttatcgacattgggatgaacttcgacatccgaatcatctgacagctccaaggcgtcccatttgctataatcaagaaccatcttgtctgacagtgaatgtgtagagtaggtatgaggtggggtggtgggtgtattagcggcagaggaaataggtgagagacaatgtttctgatcttgacgtgaatagcaacaatttgaccaatatgttttcgaagtgatttattcttatgaaaatcaaaataaatgaagctctagcgcccgagcagatgaagtatccagagctctcgacgggcttctatgggcggtagataaaggcaaaatcacaagcggtcaaatagggcagaatcagccccgaaaaccgcttttccggtggccgtgggtgtccggcgaagctctagacacatccgttcatccatcgcacgttccaaggagctgaatgtgtgccatgtgatgtactcaacttgaacatattccgactagatatggcaggtcgacgtcttattcggtgacatcattgtaactctattccgtttcgatccaactccgatccaactccgagatgcgcggtgccaggctgccggtctctctggccttgggcgttagcccacggcaggctttgagaccatatagctcctttgcttgcgatctacttcccaaaacaagatcgtctcttatctcttccggagaccacaatgggttgaaccgtctcaattcaaccgcctcgggtacactccgggatggtgccaacccactattgcttcaaaatatcagcttcagatataccgcctctacatctcgcattgtctcacaagcacgctttctatgttcgacttctcaacttcgccaagcgaaaccacccgcaacctccatagagccaactactcggtcagctacagaaccgaaagaggaggaggacaaggggtttgaactatctgagcgagcagcgcaggcagcgcaggtcaacatgagcgctagactggccaaggaaggcgcagcgggaaagaagtccgggttttcagaaatctggcggcttttgaagatcgcgcgccccgaatccaaggccctcggttttgccttctttttcctcctaatctcctcgtcaatcacaatggcagttcccttctccattggtaaaattatggactctgcgaccaaaggtgtaaccgaaggaggtagcgaattgttcggcttgagtatgcccatgttttacaccgctctcggtggaatcctacttattggggctggtgcaaactatgggcgcatcatcattcttcgaattgttggcgagcgaattgttgccaggctacgctccaagcttttccgtcaaactttcgttcaggatgccgagttcttcgatgctaaccgggttggtgatctgatatcgcgccttagctccgacactatcattgttggcaagagtatcacgcagaacttgtccgatggtctacgagctgctgttagcggtgctgctgggttcagtctgatggcctatactagtgcaaagctgtccatgatcttgctcgtcttgcttcctccaatcggtctcggggctctcttttacggtcgagctatcaggaacctcagtcgtaaaattcaaaagaacttgggatcgttgactaagattgcggaagagcgtctgggcaatgtcaagactagtcagtcgtttgccggtgaagttatcgaagtccgccggtacaacaaacaagtccgcaagatcttcgagcttggtaaaaaagagtctttgattagtgcaaccttcttcagctcggtgggtcggcagtcttgattcttttgcgctttgcgactttgactgacttcttactagactggtttgatgggaaatatgaccattttgaccctgctatatgttggcagtgggatggttcagtcaggtgctatcagcattggagaattgacttcgtttttgatgtacactgcctatgcaggctccagcatgttcggtctctccagcttctattcggagctgatgaagggtgtgggtgcggcgagtcgactctttgagctgcaagatcgtcagcccacgatccacccaaccaagggtatgaaggttgaaaccgcgcgtggacccatccggtttgagcatgtcacgttctgctaccctacccgtcccgctgtgaagatcttccaagatttgaacttcgaaatccctcaaggaactaacgttgcgatcgttggaccatctggtggaggcaaatccactattgcgtcaattttgctccggttctatagccccaccaagggcagggtcttgatcaacgggaaagatatcatgggaatgaacgccaagtcccttcgcagaaagattggcgtggtttcccaggagcctgtacttttctctggaacaatcgccgacaacatctcctacggcatgcctcgagcaacacgctcagagatcattgctgctgcacgcaaggctaactgtcaattcatcagcgacttcgtaagtccacccagcagctattatttttatgatcctaggctaacctaatgcagcctgatggacttgatactcacgttggggctcgtggagctcagttatctggtggtcagaagcagcggattgccattgcgcgtgcccttatcaaggagcctgatattctaattctggatgaagccacttccgccctcgacgctgaatccgagaccctcgttaacagtgcgttggccgctctgcttagcggtaacaacactacaattagcattgcccatcgcctttccaccatcaagcgctccgacactatcattgtcctaggccccgacggcagggtcgccgagcaaggctcctacgagcagctcagttctcgcccggatggcgcctttacgaagcttatggaatggcaaatgagtggtggcgaaacaacgtcaccttcgggcaagccgactgaggccgatgagccctggaagctccagacggagtcagaacctgatctggaggaagatgatgtagaagaggtagaagagacagcctcttcgaaaaaggaataatcgtactccacacctcgttcactcctcctattcctacactacatctcactatgatgtctgctcattcttgtagatttcttttttctttgtcaaaatacatgttctcatctacactcacctgtcacggttctcacgtcctcccttctccacctacacattctccctgttagactttgcgatagatactatgtaattacagtgtacaaagatcaatattattgttcgaattctacttttttttcggttcggtttctgtcgcctctgttctggcatgtcatggaaaaaaaaaagaaaggttatactgaaggacatgtgtgtaccggataatgcctaacatcagaacttcgagatcgccgtccggagtccggtgcgggtccagcgacatatcttgcttagtaaccagtcatatgcggacgacctcgacagcgcattacagctccttgatatgagataatccccttttttgtacagaatcttttgcttatacataagaagtagtggttgaaatacagccatgaaccgcatacgtagtctcatcgcccgcccagcggcatatgagcgactacaggactccgccgcagacgacgccgatgagacaacatacacgcagcgacagcagcaatctcccttttcaagagtacattatggcatattcttcctcctcggggtgtctatgctgtgggcgtggtaagcggaacttaacagtctccgaacccggaggaaacaagccacatacatgtgtgttgggccgaccatgaagctaacgcagagcatgatctaggaacatgttccttgccgctgcaccatatttctacagccggtttcagtcggacgactggacaaggctacactatcaaccgtcgattcagtccatgtcaaccgtcaccaacctcggagccgcctttaccctagcaaagctacagaagaacgcgtcctatccacagcggataacgttttcgctgttgctgaactctgtggtcttcgctattttggccttttcggcagttgtcatgaccgattcctcgccgcgagcgtactttggtttcctgatggtgatggtgtgcgccgcgagtctagccactggtatcaaccagaatggcgtatttgcgtatgtctccgggtttgggagggatgaatatacccaggctatcatgagtggacagggtgttgctggtgtgctgccttgcattgttcagatcttctctgtgttggctgtgcccccgaaggaggatagcggccgagaccaagagcaagaccccagcatgcctcagacgagtgcgtcgacgtcggcgtttatttatttccttacgtctacgggtgtctcggccattgctttgctggccttcctctatcttttgaggcaacaaccttcttcaagacaaaagttgacaagagatgacgatgagtctattacggatgaccgtgaaaattccaagactgtcagcctctggactttgttcgtcaagctacggtttctggcgtttgctgttttcgtctgctttctggtctccatggtattcccagtttacacggcggaaatcaggtcagtcaacgatcctgctagttcacggatctacgatcctagtgtctttgttcccttggcatttttgctctggaacctaggcgacttgaccgggagaatgtgtgtggctattccaggagtgtcattgggacaacatcctcaggtggctgccatggtggccattgggcgtgtcattttcattcccatgtaccagctctgcaacatcaacggccaaggcgctgccgttaagagtgacattttctatttccttatacagttcttctttggtgcaacaaatgggtacctgggcacaagctgtatgatgggcgctagtcactgggttgttgccgatgaaaggccggctgctggtggatttatgagcatggttctcgtcggtggattggctgctggaagcttgttgagtttctctgtcgccagtggttgatttcggtgccgtataacttgtgttcatcttctagacacaaatatcacgaatgacgaaccatgaaaatacttctatcctttggtctcagcataagcatttgtttgctaggtgacccattgagcccttgagccctttaatgtagcccctgttttccgtttgataggagccctaagttgagacccaaggcgaagtttgccggctgtcgccttcatgttttcaatcactcttaaacacgccagtcatttcggactttaagcgatctcctaaaagcaatcactcaccatctcacatctcctagtcaactcctattacaagccgcttgtcgtctgatcttctgtttgcccgcgcgcttcctcggcgtcttgtccttcaccctctcttctcttctcttccctttttccctccacaccgttccctcttttgatatttgtctttcctttcgggtgtccatcagtaagagaaacatcctggatgtctttgattgtataacttacagtctctagttgttgttcatgatgattttcgtttcattggctatgggcggctggtgccatgccctagctgtcccttcattctggagtctactgagtggactccttgtcttggtgagtactgacatacaaaaccaggtatttaaggtgtggtgtgtctcatttcaatcaattatcacagtttttcatttactatgtgacctggatcatctacactctctgcttccactccctgagtggctaccctggacccaagctggctgccatcactcctttggttcatctcgtctgggacatccagggcaagcagcactcaaccgtgaagcgtctccatgacaagtacggagacgtggtccgcattgccccgaatgccctcgtttaccgtgctgcacccgcttggaaggacatctacggtcaccgcaagaagggacataaagtcttcatcaaggatcccgccttgtatgcacccactcccaacggtgtcaatgcaatcatcaccgccaatgaggacaaccactcccggatgcgccgtttgctgacccatgcgttttccaacaaagccctgcgcgagcaggaaggcatcctccagatgtacgccagcatgttcatagaaaagcttatgggtctcatgggcagtgctgaatcccaggacattgacatcacctgctggttcaacttcaccaccttcgacctgattggcgacctcgcatttggagaacccttcggctgcttgtcaaccagcgaataccactggtgggttcggattattctggatgctgtcaaggcaagtgcctacctcaaggtgttttggttctaccctttcctcattcccttggtccgcgtcctggttcccaagcaccttcttgagaagcgccaagccagcttcgacctgagcgttgagaaggtccgtcgtcgtcttgccctaggtgccactcgccccgacttcacttcatacatcctcaagcataccaaggatggaaagggaatgtcgcctgaggagatggatgcaaactcggcggtctttgttctggccggcagtgagactacggctgccctgctttcaggtgtgacatactaccttctgcgctgccgtgacaagtacgagcgtttggtcaaggaaattcgtggtgcttttgacaaagacggtgacatcaagctatctaccctcgtggatctcccgtacctgaacgctgtcctgactgaggcaatgcgcatctacccgcctattccttcgatgcttccgcgaattgttcccgaaggaggcgccatgattaacaagaaatatgtccctggaaatgtgagtacagtatgccggtaccggtgtaatgtggtgttttgtggaaatgtactaagtgcatggacacaacacaacaaatccaatttcttagatttctcaatactaacaacaagtaaatacaaacaggtctccgtctctatgtcgctttactccgccttccatgcagctgagcacttcaagaatcccgaggcattcgtcccagagcgctggttgaacgagtctgacgagtacgccaacgacaagaaggaagccttccagccctactcctacggtccacgcaactgtctcggtcaacagtaagcatccattcccttactatctactcactccatccgtgttttcccctcagtcgtgcctaacagtgtttgctaacattttaactacagcctcgcgaacgccgaaatgcgcctgctgctcgccaagctcttgtggaacttcgacctggagcttctttctaagtctcttgactggactgaccagaagaccttcgcgctctggagccgccccgagttgatggtcaagctcttccgtgccggtgctggttctgcactctaaattcacgaattcatgagacaattacgagatctccttttaacagctcatcctgttgtgttgttgtctcaaccgtgaaaaagcattgggccgaaaagcgtttgtcgaaaatctagcaatggcgttttcttcttttgtctcggggttgcggctgggctgtttgtttcgtcctccctgggattgtcagtacataacatatgtacctagtcatctgtgggctactcccccggtacaaaagattggaggcatttgaaagtgggctttcgctagaatagaaaaatcaaaatcaaaatacagtcttctgtcatggtatggtcacttggccggaaaccgctagacagtttattatggctgttcaaaaatcgtatttgattattctcacttttgaggcaaagcaatatattttgcatgcaatatagaatatgaagatattgtatatgcaaatcccttgtactggtgaggcaatgcgccttttatctaaataactagccccaagcccacaatatgtgaacaaatgataactcctaaccatgcaaattacaaagtccatgtaactcccaggcaatgctttttcgtatactaaggaatcatcagaaaaagtcctgttcactcagccatcgcgagtccatcgcgtaggccaccaaatccgcagcgcaacacatgtcttcgtgtccatgctccaagtcgaggagctcaaggacggcttttagtctgccctctagtgcttgcttcagccgcgagatactagcttgcacgtctttggactgtctttccttgagggacccggccatgttttggtctttccctttggatgtctccggttttggtgtcattctgttgggcgaacaaggcgcaagagcctttcgctgtggctgtacaaacaatgcttcaggcttgcgatttttgaaaagactctgaagcaggaagagtagccacaccaagttggtgcgtggagagtattctgcccagatgccaggaatatccgctaccttttctgtttctatagggcaaccagtatagagtgttgcgcgcatactgaattttaagttagcaagttggtaaagaaagcaaatcagcggagatagggtaacatactatcggtaggtgtttcgttgcataatctcgtcttcatcttggccaatagcatcgaacaattgcttcttgtccagatcagatgatgcaacctcagtgagaccagcggggtcatcggtcaggagtagatccgctcgagagagcgagtagtcaataatggtagtctcaagggagctgattccaaacccactgcaggatgactgtcgtgcaacatcaaattctgtggggggatccaagcaaccatcttcccgcgtagaacgtatacaaacatttcctaaatgaagatctcgatgttcgaacatagcatactcctctgcccgggccagagccatggcaactccccagaagatatcatagatttggaaaatcgatgaccaagcgaacttctcgagttcacatcccgcatcgtccatctccacgattgcccatagctgcgtatccggataagctcttttgttggatggattgggatttaggcagtcatctttggttttcttatagtggtcccatgcattttggaacgactctgggaaacgaccttgaacaacatgaatctctctaaagcgagcaaagccagggatcgggtccaaatatttgagcattttgacctcggaaacaatctcgtcgatggtggtgaattttttggatcctggaccgctctttgctcgcagaggcacgaccttgaagactccatcgccatatgatttcagtttagccaactttgacttggacaccaccggcctgcaagcttcttcccgcaggtgaagcttgtaaacttcaccgtaggatccctctgcgagttttgcgacgtggaacatgttcgctgatcgtgaggcccacgagctgaacttctgaatgccttgggcggcaatcggagatagtgcctcattcagaattgggctaacataatcactggccttgctgtcgtgaacaactccagatgaccgtcttggtgcaggaatcttttttctttccgctcttcttctggaggatgtacttggcttttctcgatcctcgcttgtggactctggcatcatagctggggaatctgggatggcttgaggaagtattcctggattcttcgggcatatcctgacctccaccatcgtttcgcatttcttcggttctagcttcgactgctccgagaaggattcgaaggaggatcgcggtgtcagggtgtccgaggtatcctctatcgtagacggactcgattcacccaagggaatttccgtcaactcttgctcttgctcgctctcagttttgataggctttgtgtaattgtcttgttgaagggttgagtcgtcatcgattgccacttgggctagtttcgcttggaggctttccacggggtcgagatattgggtcttggatctggtatctctagcagggcttccatgatcaaatactgccctaggggcattggctcttcgtttcccgtacactctgcgctgagctacggatttgggtttggattgtttgggttccattggtgtcgcgtgactcgagactggcgagtgtgaccgggttgacattgtcgaggaatatttatacactcagtatactagccctgatatgtggaatatccgtgtaagggggttaggatgattctgttcgacaggaagcggtcgaaagagacgatttgggccagaagtgatggatcgtgttgatgtttaacctaatcgggattagcgtatggttactgcggtgaaaacattctgcccttggcctctgggcttttattgtactgttttacggagtatacggggaagggagtgcttcaattgatgttgctttggtttacagactattgagtgcaagaaagctttatgtgattgtgtttgaacagaaatagttggcttatgttcagtaacaaggcagaagtccggggaaagggtatacttctccaaccctgcctcattttatacaagggataaaattcttattttcatttcattgctctgtccctgagacctgcactttctctcggagtcttctttcccttacatcgtacatgaaacgaacgtgggactcatactttaagatctgcatccccgtggctgtttctgtacgctggctgcactgcgtatagtatgacaccttcagaaacatcccgtgtttcccccccctttctccagattccgggcaacacggtcataagagagccgatagtccaagagtctagatacgtgcagcccgaataccgtggacggtgaatggcccaatatcatccacagtggacatgacgccggggctgaccggaagtggtccctgagaagtcacactgtgacgtaccgcccttgtagtatccggtcgaaggaatatagcataaacgcgaaaaagaaacccaaaaaaagataagaatacttagaatgatacatccaattaaaaacgaactgaatagtgaaacaaaataagcttaatgaagaaaacaataacagaaaagtccttaagtgacccggaagcacgcgcctcgggtgctttgccttttttttctgctttttcgttttccgcctcccgccctccctctctcttctctttgagacttcatccaatgtccttctaacactttttaatcctttctcgatgcttgggcatggcgttcaacttcaactggtcgcctttgatggcggacgcgagtttttatactcgcgcccaagatctgcttactgccgcacttaacaaatcgccaaaaccccccataattgtcgatgatattcacgtcaccgagttgaacttgggatccatcccccccgagctcgagattttggaaattggggatttggccgaagaccgctttcgaggcatcttcaaaatgtcctatactggtgatgcctttctcaccttgaagacccgcgttcaggcgaatccgctcaataccttcctgctcacacgaccaacttttggctcgccagtacctcttgctgcagcgtaagtctatggtcccacttatctcttatttgactccaatctattagatgtgtttgctgactgtcgtgattttagtaccccgctcaccatacctctacaaatcaccctctccgacttcaaactttctggattcgtcatactcgttttctcaaaacaaaaaggaattacagtcgtgttccgcaatgatccccttgagtcactcaaggtttcgtcgaccttcgattcgatcccatttgtgcgcgacttcctacaaaaagaaatcgaagcccagcttcggatattgttcatggacgagcttccagccatcattcatcgactatcgctccgtatatgggttccggaatatcgcacaggggaggaaatgaacgacgagaccgataacacagccaagtcaagaagcgaaggccctggccaagatcctctggctagcccgccacaggatcccgtcgactcactcggaaatgcattgaatgaatccgaaatcgcatcgctctctctagattcatcggtcgagacccactcgcttttctcacaaaagaacctccttcgcttggccgctctgacagattcgcaacgtacactgtccttgttcactccttcgatcgaggaagtggtgtaccgagcatggacttctccaatcgatcccagcgaattttcctcgagcgtgatctcaccactgagcccgaccctttcacgaacgcattcccaaatgggaagcatgtcttcccttcatgaaaccgccagcactgtctccatgcaaagtcgaccctctatgtccggccattcattcagtactagtacctatggtctgagtctaggcgctggacgtcattccaaagctcacgcccggaagcgcaagaagcgtgttgtggacctgcgccgccccaagacaactgatgacgctatgagcgtcggcgatgagaacgtcatgaccgagtcctccagaacgccttctatcgcctctgcgcctctgcccgttgtaaatgagccgtcagatgacccagtcacaccacctctatcacccgaagccgactcccatttgcccattatcccagaaaggcatttgtccaacttctcccgccccacacgtcgggatggagacttatcatactcccatgagactatccgtggacccaaagcagaggacgtgcatgtcacccctcatgctactgtgcgtggctatcccaatgagaaggccacaccggggccgtctagcaatcaacggaccccgttgcctacgacattcaaagacgagaatgccaacaacgaaagcgtcgattccgtcctggttgagagactcgccggtgaaatcgctcgtcgaatgcgcgaggacaagcttatgacaaatgcatgcagcggcttctggagtcgccagcgtgaagacagccctcccccagcgtacggccactgagcactcacctccatatatcttctacactcgagcaaccctcgagcatgaccgttacgatttccttacttctccttattttgtcttaccgtttcttggttgttcttttgttcttccttttttggggcttaactgatatttctttggagcgggagtgtacaaaattgggtcctgtcatggtacagctggcgtcgagttctgttcggggtttcatttttacatgataccacactcattagccattgtttttttatgtatttcttatttttaggcaggtcatggggtacctagagcagatgagatggatattgggggtctaaattatatgaaatatgtttgttcccaattgctccaatcgctccaatcgcctaaatcgcctaaatacctccgatgcgatgcgggtaaaaaagctggagacagcgctagaccgggaggaacttagctccgcaccgggcaccgtgcaccggacatctctcgattccttcccactcctttcccttccatccatatcacaccaattccaatatggcgggcatgttcaagaacgtgtttggctcccatgaggctaagcccgatgatggtatgttaattgatacatctcaatttctgagctaactctggtagacttcgccgacttcgtggaagctcccaacccgtcgcctgcctccctcgtcgccgactcgactgtcgttccagctgccaacacactggccgccaaggccgtcccctatacagcctggtaccgggtatgggagaggacatccccgagcgatttcaagcaggaggcgatgattatgccctttatcctcttgattgtcctcttccacctttggggagtgcgcaagaaccgaaggagggcgagggactgggcgcaggcccacgtaccttctcttcagaaggagtttgccgtcgtcggattcgatggaatcgcccgaccggctgccgtggacgggatcaccgtggagctcgccaaccccgagtcgctgctgaaggagaagaccgcctccgagttcgccgcgtatgcgactggccgccaaaacgttgccttcctcgacgtcaacatcaagatgcccaagcgatacaaccccatcaccttcgtcatggagtatgtcttgggcttcttctttgagagctgggagccccccgttgagaaatacgaggctctgctgtatgctttcgatggcaaagaaaaggacctggttcccgttatcgctaaggatgcttcccctgttaagctgcctagctcgacttacgacggcttcatctgggctgttgtccacaagagccatatgcgcaagttccgcaatgaccgctacgatgcctctatcactttctccaaggataatcctaagctcccctcgtgggttaccgtgatgactgagagtgccgagattagcgatactctcctcaccccggagttgatccaggccattgagcaggctggtaatgactttgagttcttgatcgtgacggaccagcctgtcgacagaccgaccaagtaagtagcatcagtgcgaggcttaaatcggattcgttactaaccaatgtgtgttcctaggatcgaggagaccgtccccaagaagcgcatccagctctccgccaacctcgcctcctctgcatcaggctacgcctccaccctccctctgttcaatcaattcctacgcttatctgacaagctggtcgcctccgcccatttccgtggcgaagtcatgcgcaaggtccgtaacgtccgcgaagaagagatcaagaagctgcgacgtgtcgacgaagaagagaaggctgaggagcgccgcattgccgccgagaagttgaagaaggatgagcgtgagcgcatcctacgtggaatgagcgccgaggagcagcgcaagtttcttgaccgcgaggctcaaaagggacagaggcgccaggcgaagaagagcacccggaagggctagatgggtgtctttcgctttggaggatttctattctgtcttctcgctcctttctgtgggaaaggtgcgggttgaatgtcttatcctgcccttttgataccttttttaatttgatgtattcatatttatttgtggaagatatgatatctaccatgagagtgggatgcaatcttcatacgttcaactatattcaatgcagattttatattcagatcattgaggcctgtgtctgatttgaattccagggaagtaacgaagtagatggcgttactgccgtacatctcgtcaatcccaacatcccaacctcaccccatcactccaatccagcatcaacagtcattccaattactcggttatccttatatactctgacctgtttcaatcattcatcacaatgcatttccttgcatttccaatctcattgctcctttcagctattaccctatcccaagccgctcccacagggaacagtatcaacgccagcacaaccaccaataccacccagctcaacgcttccagattaccatccggagccattatcacccgctgtaccatcccggacacaatcgccctcactttcgacgatggcccgtacatctacacatcccagatactagataccctcgcccaacgcggcgcaagggcaaccttcttcctcaacggccataacaggggaaacatcgatgcatcacccgagatagtgcagcgtgcattggcagaaggacaccagttgggatctcatacgttcgtttataccacccactggcttactctctcttccccagcccagccagtccaagccccaacatacacttaccaaataaccgtccagatggaaccacgcctccctcgataccctctcatacgaagaaatcgtataccaaatgacaatcctcgaagaagccttcacacgcatcctaggcttcttcccgacctacatgcgccccccgttcctcagacacacgcccgtcgttctcggcgctatggccgatctgggataccatgtcattggggctagtgttgatacaaaggactatgagaatgataatcctgatacgaattgggttagctttgaaaagttcaagagggaggttgatgctggtggcaccattgtgttggcccatgattcgcatcagcatacggttgagattttggtggataatatgcttgcggatgttcagagaagggggttgagacgtaagttttctttttcctttgtgtttgtcggtggttatggggtgaggctaacgggtttctcttatagctgttcctgttggcgagtgtcttggtgatccgtctgagttttggtatcgtgctgggaggtagatggtcaaggttggtgggggtgtgttttatctcgtggttggtcttggttggtcttggtaattgttctttttcgtctttgtgctggggtcaaaggggtgtctgtgtatagaactcctaggtttcattgaacttctgcgttattctttgttcttgacgaagacgttctatatatatgcgcactcagtcaatttaatccaggttatcagcctggacagcctattttcatataataccagtgtctactgtcatcgtaggattagcacgcggtcatcaacacaatccggagaagtgaccatctagtatataattgattcgcttcgctccgcaatgaaatgcaaagattgtgggtactgttggtatttgtattgacacagtgagattgctcacatgcagcttgtcagacatttgtttgcccatttgtggtcctttatggattccaggcctttatacccttgtccccatgacgctatttaaaaaacatcatggtactactaagtctatcatcagcaatatatcttcttctggtcgcacttcttggtcacttaactatatatcatcgtctgtcgagttatatcatgccgagtgtcaagctcatatcatgttcgagccatttctctctctctcgcagacaacattatattacttggcacttgctacccactgtgccctttgatgagagtgtctaaggcactcagacacgtgtgagtggcttctaccattcttcttttgaactgtacataatctgacttgctcaggatgcacacagatcgacaacccatagacctcgagagtacaatcccaaccgtcgatggtatgactcttttctttatatgtggagatcggtatacgttgaggaactaattctgtctgtttagaaatatagcaacggcatcccaaaattcagagcatccaattctcagaaggctatgtcgcgtataagttgcaatttctcactcatctcatcgttcgaccccaactccgataaatttgggttggaagcgcaaatagtcagagccccaagtcttccaggtcgtacattatttgactttgatgccagtatcgccttgctcctcccacatattctgaattcgttcatccccagaattgaggctgtgggccaggttcttggggcagtcctcagggcgagcgtgaacactcgctttgctgatttcaagtcgaccagcactggctatatatacagacaccgcatgttgtatactgttgcgtggtgtcccggttatcctagaagccgtgggtgaactgaaagtcccatggattggggcacacttggtgaaagagccatttgaaaacgaacgaggtttcggtcgtgtgattggacaagtggtcgagtatatgattgatcaaggaacactctatagatttcactccacttacgatgagaccagctcttacgccaagtccaggtgaacagagtttggagagtggtgtactggtctattatcgaaaataataacaaaactggagtttcagccaagtcatcgctagtagtagggcaccctgttcgaacccccactctaattcgatctatataaaaagtctatactccaattcctgccccatctatatctacatagaacctacaacttcccaaaaatcttaaccctctcctcaacaggcttctgtaccttctctccagcagcagcttcagggctgccaaagactagctgcgcaacatttcgccactcgttgggcagaccccactgcttcgcagtagcagcgtcaatgagcgggctatagtgctgcaggtttgcaccgaagccgagcgcttcaagacctgtccagactggtaatcgttagaatgggggaagaagtgaaacgaagaaagaaaagagtaaacatacggaagtactgatgcatagcattggagtggtccgcccacggcaggaaattatccttgtatgcagggaatttctcctgcatgggtttgatgtgtgctgggtcttcatagaagaggatctggatattgattagctatggacaggactaaagatctcgagttccaggagacccaaaactaaaagctcattacgtaccgttccatacgcccccttgaaaccaagcaacttgggcaacgtctgcttttcccaaatctcctgtgggattttacccgtcttaacaagaccctcgaaaacctcgatggcgatatcccacagtctatcgtgatgatcgtgcaggagtacgactagccgcgtagactgggtattgaacgcactggggacatgcaagatggcggcattgacaagctcttcgatcttagaatctgagactggacttttcttgccgagcttatagatcgtgcgcctgttcttggcgagatcgatcaaagcgctagacatgtttgttgctgggggtggggcttgcttgtaggttgaggaggagaatgagcggggtgtttgtgtttggggttgacagttggatacaaggcgtgttgtcctggttctgaataatgctgcgcgggttatggcgagtaggggggattgagtgaagcgagtggtcattttgggggttcggatgtgttgtatatattgtgttttgtggatgtctgtcttttatatatgttcacacagacttgtggactcttgcttaccactcaattgctaatccgggggactcggtacgcttgtacccggtactccgtaggggcaatttccgccggccatcgtgatatcgcggatttacggatttacggattcaactatttatagataactaagcagttggcttagtcagcagtttcaaggccttgacccaaacccctcaggttggctcgtgcagaagtctaattactaatatcccgaagaagccccacttcgcgataagcgttgaatcctcagtcattcttcatacaatatacatattcttccctctaacatccatacatcacaaaatggaccccaaggtcggagtcggcgtttttgttctcaatgctgcaggcaaattcctgatcggtaagcgaaaggggagccttggcgctggtacgtgcatccaatagaatactatacatgcaatagacctcaattataatcaaagcttaccatttgtgattaaaggcacatggggactaccaggtggacaccttgattttggtgaattttttgagacttgcgcggcccgtgagactctcgaagaaacaggtctgaagattcaggatgtgcggttcctgacggccacgaattcaatcttgaaagcggagaataagcactacattaccattttcatgggtgctgtctgtgaggatggtgctgaaccccaggtaggttgattgaggtttgttttatgtgtttatgtgtttttctgtttttatatacccccgtctcgtggctgcgtacactgcaggaacagaaccaggatacgcggcttacttcttggtaggtaattgagccgaataggtgcgaggggtgggaatggatctcgtgggatgaattgcgggcgtatggggaggagcaaatcaaggctggtgacgggttcgagggaagaaggttcttttcgcctcttttgggattatttgaacaacgtccggattttcgagtttgaatattcagcacataggccgaaattgcaattaaacaaacgctctgtgtaaattatggatatctgataacccggatgctgtaaccaaagcctcatgattcattctctcaccctgatccttccaatggagacaaccttgaagctttgttaagatccaagtcaaactaaggaacatgcgagccagaattttcatcagcagtccgctgaatcctcactcgcatgacaaaactcgaaaagtatgatcgcactgcctcttgtagccatagcgggaaggccctcagcgacccaatcaccgaggaatgtctaggcaggacggttagcccacttttccgattaacaaggtgctccaccactgcctgcgagacgtcctttggatctaggagtggttgatcgaaagcagcttgatatttagtgaagccttcgatcatgggagtctgaacccaaagggggtgaatggtactaggtgtggtcagcataatttctctttgaataagactttgccagacaaacctcgtccgcacattcggagctttgtaccaatatttcaactcttgccgaaggccttcctggaaagaaagagcggcagccttagaacaagcatagtccaccatctcgccgagagtaacaaagctcgcaacgctcgctactgtaagaacatggccgcggttcatacgtatcatgaacggaaggaattcttttatgatgaggaaatgggagatgatgttgacatcgaatgcctgacgcaattgctcctctggcaaatctagaatggtatcatgatggaaaatagcagcattgttcacaataacagttggctctccgtgtgcctttcgaatagcagcgccggcttcggaaagagatttggccgatgtcacatctgtttgatagaatgtgacgttttctggaagctcaaaggtaggccggatgatatcgaggaccacaacgcgtactttattgcgagaaagatcttccattatttctctgccgatgccaccactgccaccagtcaagagaaccagctcattctctgggatccatgcctcgctgccttggaagttgtttatcactcgctctgagatctttgtgttgaggtagtaaagacctacagagccaactaacacactcagcgaagatttgatgatcggtgtatccaagagattaaacatggtgtcaagggagagttccgatagtcacacacaaagtctgagtagtcctgtaaaggtccaagaatgagaaaaaaatgaaagtcaatctcgggcaatttggattctgcagctgacccatttatattggaggaggggaaagggcggctattttaacccaagatcagcagcaatttctgcgcttgtgttgcacaggcctttggttcccgagtgtggctggctgacttttttagccaacccgagtagaaaaggagcatttcgctgcgaataccgaggttatcatcgcttcttcgaggcacatgttcatgaacagggtctaaaataacgaagatccgatgcaacacggagtcaaagggggaaagatccttgcattccaagctatgagtaaagaagaaggacgaatacatgatcttatcatgccccacagggctgataaacttcaatggctctcgtgttctgcggcctattgtactggacttgaaatcgtggccaacaaatgatattctattatgagagccacttgaggcgtctcggtaccactcctaaacgaactagatcttacggttgagataatttgcaaagataacagacactacgacattggcctgtttagagtgaaggtcgtcggcctcgtggaaagaatttggaagccttgcctcaggtcctgtttgattttcgagactagacgggttcgctttccagattgtatttcagatgtaagaacgagagagccatggtagccataatggatagtgagtatgtgtatatcaggaagattcacaagtgaggattcactcttttataccatacagcaaagcaacggaatttgagagaatcttgggctatagtgaatttgatagagaaccagcttctcaaatacctgccaagctcaacacaggaactggaaacaccttggcatttgcttgatttccctgctttatacttggaagagtgaagaacaaggagcttaatcaactcgagccaaaaacccagtcagatactataacagcgatagtcacaacctgtacaaatatcagtcaatctatacaccaagagccctgaagattcgaatacgcaccaatgaaatatctactccaggcattataatgacatccatagcaggtcgatacccctgtctagagcctctcatcaaagccagtttctcattatgacgaatactctcccgaatttcagcaaccttcccatccccatcaacgacatcaaaaagcgccagcgcattcccatgccgttcaatattcagagtaagcattttctcatccccgagctttccctcgaacgcagccgcattttcgaacgaaagagcaaaattcccaaacgaagtattgcccaacgtccatcgcggagtgccagtagctatcgtggcagtatcacagcctggcaagctaatcgaccaactattcgtccacgacaatttccggtgtaactcgaagagcggcagacccgatttatcgcgaaactcccgacacgagcgatcggtgtacttgcgaccagtcaccgtgaactgtggtgttccatcctcttcggtgatcttatatgcgacggcggattgggggctgccaaatggtctgagcacgagggttgtctttgagcgcgctatgtattggttccggaaggcgatatcgcggtctggcgatcgaaggggtttgcggggcttagaggagtatgagcgcgatagtcgagcgtcagagtaggaggtgtaggacatggttggtatgccgtgtttaatcgcaagacggacgcgctgggattatgcggggcacctctttatactagggttgggttgcattggtgtatcttgcgctacttatccctgttgcggcatttacttcggcgaatgcccgatgatctcactgattgctgagccaccggatgccaagaaacatacatgaagctattcccctcggggcttcagcggggtaagtggaatgatgatttgtggctacatccggtttcgaacgacgcatttatacctagccacctcttatacccctctcagagaccaatgctccaaaatttagaaactctgccatcccatataaaaagcaacatcggatgtactgccccggtgggggcctatatctgctgagtcatgttccacggcctccggtccagggctgtctgttaggcaaccagctaagtatcaaccacctgagtatcatcacgatcgatactgttatacaaacatggggaaattcaccgtcaaatctctagaccacctggtccttacagtccatagcattcccaaaaccgtggcattctatacaacatatctcggcatgcgacatgagacctttacctcaccaactaaccaatccgttcagaggtaacccctcttttctttacaatcttagtggatgttcagaggcattgacgataatagacatgccctcatctttggctctcagaaaataaatctccaccaatcgggcaaggaattcgaacccaaggcccaagatgtaatgccgggaagtgccgatctgtgcttcttgaccgatgagaatgtggaaaaggtcctggaagtgtttcaggatgccagagttgaagtatgaatactcggctttttcggatgcagatggagactgatctctacaggttctcgaaggtgccaagattgtagaaagaactggggccgttgggaagatgcgcagtgtatacgtgagagatcctgatggaaatcttatcgagtgagcgtttccccttttctcttggagtactccgttgactaaccccagcgacagagtgtcgaattatgtttgatttatcgataaaccgactgtgccgagacaatgggatagctattctcatagcgggaactacgttatgggcctgttttccctcctggtgtaatagaccttatgaaagtagaatgacctgggacagcagcctgcagattatatataggcaagtgtatccctcaaaccccaaatcttatgatctatacaaatcggaaactcgaaatgtattgatattctaatgcattcttaattctgttgcaaaaaaaaagtggtagaaaatcaactcctctcgagtctttggtacgaagagagatacgcattctcagatatcaatcggaatatccgggcctctgtaaatgcttgcaaaatcgccctcaccatgtaatggttcaagtcttgcccatagtgggaagttgaagtttgttgacttggacatatcgcatctcaaattattccaagagccgaacattgcttctatcccaatcagtctcaacacctggaagttaagtttgagctctcggcagtctatgaagcatcggagtttatctctgaaatgatagacgttggcacactgctgtgggtcccatgcaggtaaacgcaagacttcctgataagacagggagcctggtcttcatctaagtgtctcgggttcagattcaatgcaaaaacctctgaatacatatctctcaatcaatcaaagttcagttgacctgcgccttcttgatgcaaaaagaattggctgatctttgagatgatcggcttcgcctagttactagcgcactgtcaatatatatcatcattgagtcttttacgccacacaaggagtagcacaagctccgtacctatggttaccaaggattggtcccgacctcttataggaggagcatagaaagtaatgtctaactataggccctagataggtctatacaacccgttcacgtccgtactctctcttctatgattacatcctattccttaatagagggaatggcttctaactatattgattttcgagactgaatgggatgtcgatcagggtggggtagagtcgctgaccgccatgatattcctaggtaagagtgatcgtcttccattcccctcacctcaccgttatctccagccttctccctgctgagtttgtccctatccaaattcctgtggctctccatatatctgatctgaagtgccctaggattacaaattggtccttcagatcttcagacaacccacttcaattgtatccaacatgccgtggcgtccagacgagcccgtggaacttcccaatggccgcctagtgtgcagacagcacggactcgtagtttgcggctactgcactgtggactacagcttcatggacgacgatgacgacgatgacgtcgatgatgacgatgacgacgtagaatccttagactcaagcgaccacacggacggcttcgtcgctataccgagaacaggctcagagctcagagtcggcacggggggcgtcttccccacgaagtttatgcccccaaatccaaatgataccccgaagtcgcttttcccactcaccaaatccgagaacgccttgccacctgtatatcggttcattcgccgcaacagccaaaaaacccaattcctggtttacacggacggcgcgtgcttagacaacggtggtgcgaacccaagagctggttgctcctttgtttacaggaattctacgacgaaccccctactccatggctttttaaatttccctctcgagaaaagtgggcccactggtatcgcgaacctgcaaacaagcaatcgggctgagcttcgcgctgtcattgcagctacgcgctttcgctactggcttggggaaggatgtcgctgtctagtcatcgctactgattccgagtacgtggtagagggcataacgaagtgggtgaaaaattggatacagaaggactggaaaacaagtggcggaacgccagtcaaaaataaggacctttggcagtgtttactcggggagatggaacggtgggatgacagaggaatgcgtattcaattctggcgtattccaagagaattgaatacagaggcggacgagcttgctaaattagctgctgataaggatggccctcaggaatttgaggatatcaagggcgtccttgtttgagggcatacgagcacagagttgctaagtctactagccggcaggttcaatgagaagttgttctatctgtacgtaggaattgggcatcttccagatccatctggattttactgttgcattcgattgatctcaatgttatgggttaaaccgaagcgtttaaatcgtgttgaataagcggatagctacctgcaggctgcagtactagcccaggtcagcttaggcttcgatgactcctttctacgatatcagctgagtgtggcatttttgcaatatttcatattcgactaaacgtgtagtcattacagaataatatgaggacacctttgcccaaaaccaaagcgcaaaccctcaaagaagaccccgaaaaaaatcctaaaagtcaaaaaaaaaatactatacaggccaaacgactcatggtatctgttgcctctggtcaaataatcaaaggaatcgcctttctagacgaggttggtataagtctcatgctaaataagactgagagggtcttcgcgggctatgtaaagcgcactcgcccgaagcttgactgatattgcttccccgataccagccctggtcaatcagccgtgtttccaggtctcgccagtagccagctttccccccagcgcctgttttcagatcgagatcaccaagacggatctcaacaggtgatttttcgtcatgtgggatctgtggatcggtcagtattcaaatctagatcatgtttcgcaacagacaggatcttgatgttgactacaacaaattgattttgcagcatgaactcaccttgataaacatcgtacagtccctcagcgtcatcgcaagcgacatctcccgggactgcgccgccggaccctgcagcccgacatccctttcggtcttctgcagcgactgcagcctctgtagcgtcgggttccgatataaaatgtgagctagtcgcgatctgtccgtgcagcctttgataaaccctgtcgctcgcagaacattctcatactgctcggacaccagatccagcggacagaaggaccgctgctctttcaggcctaggggttgcgactcgcggtttttcatctccctcagcgcacaagtccggcacctatgcgctgtggtaggcgccgatggcgattgattgagccatttgggtttcagctcggctaggctcgcgcccgggtcttcggtcgttgtcatgtcggtgatgaggagaccgaatcgctcatgtagacagagatagctgccatggcgtttcttcggacgcgtaccgtttaattcggcgatctgaagttgcgagttgcagctagagaggagaccctctgggagtctaatgagggtttggtcgactagttcctctggtttgaataatggtcggatgatagtgtcaaagtttctagcaatctctttgtaggagatgtcggctgcagtctctttgcggagtcggagcaattttcccttgagttgggctggtaggttgcaatgatcctcgaatgcaggtggagatagtggcctttttgagtcttttttaacgagtactggatttccaacaaatcggtaaatcacatttgctcctccctcggcgaggtaaacgagccgaactcccgaggggagttcaaggagattgggtttggtcatccgttagaaggatgggcgttgggctggaaatcctctgcgatcatgacgtggctgatagtagacaaatcgatttagatcgattttgttaactccgccaccgacgataatgcgtagaatagaatctaagatcgaaaggttgggaatgtgaaacaatgctttaatgaattatgcagatgtatccagtggcgagaggctcaaagtggtccaaaggggttaaaccgagtttagtcggatctcacttccaggctggggtgtccaatcagcttcgaaagcgaaattcaactggcacgtctaagacattcaccaaccgaaaggagtaggattcgagaaaaaaacggagattccggacaaagaagcccgacattgactgaaaacccccggggcaagggtttagttgtggggactcaataagagtgcgagtggcgtaacccctagagtcgatcatagcaaaggagttaaagggtctaggaagttcgggacatcatgaaatcaaggaacctgaaatcatgaaaaggaagatctccatgaagttgtagaattggaaatccccagattcagaggagaaaatccgatgaagccgtatttaaagacaatggcggtcaggaaatcggatatttcaaattgtagagatgcagcgagtgagactgtgcaggagccttggaaagaggctcgagggtctgtcaatatcagttgggatgtgaatctgcaaatgtctgcaataaggaaatatgtcaagatgagtgaaaaatgtcgtaaatgtcggaaatggaagttcaaccctctatggcgtgtcactgaccacatcctcatcatttccccgggttatactcatctcatctctcctcatctctccatctaatctccctcctacatcaccccaatatccttttaccccgccatttcaccatcaacatccaacatggccactatcgcaacccccgcccactgtatcgccgacttctgtctggtccctgtaaggaagtcacatgctgctattcacctcccccgactaacagcataaccccagatgggcacctccacgccctcggtctcagaccaagtcgctgacgtccatcggatgatcgaaacatgcggcttgaaatatgtcatgcattccgcaggcacaaccctcggtacgtatggagtacatgtctcgaggctataatacgtactacactatgcatagtattgtagtactacctcggccactccggccccattccggttcctacttgtgtagaacctgctcctctcatctccaactgtgggctgatttgtctctacggctgaaactaaaatcaccggagaaagagagagctgagagctgagaggcccgtgtgacactattcctatacttactgacgttcctggttttgtagaaggaccttgggatcgggtttctcaagttatcggacaggcgcatacgatccttcatcagaagggaattgttcggattcatactgacattcgcgttgggtcgaggtgcgttcatctgtttaatgcctccatttctcattgctgatcgtctttattaggaccgataaggtgcagtcgtttgaggacaaggtgaccaaagtgcagcagttattgaaaaaatagaggagttcaactccgaaaggcaataaaggcaattgactttgaatcatctcattcgttaaactatatgactagactagatatcctgagcttgggggaaatgctgaaacctgccatcacatcccaattccaacccaaaacgccttgctcttgaatggaagtgtcctatatccctgtgtaccgtccagtcagggcacagccccatatcgcaggactcaaaagatatccaagaaaatacatccgaacgcttcaaatgtaaaaaagcaaagaaaccgaggtcaaatcactcagctcagaaggaaattcccccaccgagaagattaccccagttcccaccagtccaaatccaatttcccatagacaccgacgtgcccgacttcgccgattccgcaagcttaaccagcgccttgaacacattactagtagacgaggcatcactagtcgaatccgccgaagtcgagacagacgtgcggccaaccgcattggtgacattattcaaggtatcgacagtatcgatcgccggaccacggttgaagaagtccaccaagatataggtcggctgtcgcccactccacgcctccttgcaagttgtcgccgcagtgcccaggttgcccgttccgccggacgcggcgttcgtcgtggccacatagctggagttcgggtactcaacgtccagtatcgcgaggctgctcgagtacagaaagtgattcatcaatgggagaaaattggctgctagtgccgatgcgctgttgtctttgtatgccgacggtcggtccacctcgcatgagaagttcgacggggaggatacgtcgtatggattctcccagatgtagctccattcatccatcaggtaggggtaggtggtgctggtgtctagtgaggccacgaagacgacgaggcgcttgccgtcgtcgatcatggtttggagggttggccaggtggtcggggcggtgcctggggatgtcggctcgtaagcgtagtcggtaatattggctgttgtgaattgggtgttgagctcggaggctgtggcgtcgtcggagttgactaggaggattgtgatcactgtttggatgttagtttcctttctagacgtcgtcgcggaactaactcaccctcgttgggattatcatccaaccacgtcttgatgtccttcagccaatcgctcagcaaccccgcatctagcaggtcgcagctggaatggcataggcgccattgtgagttgctcttgtggacttgggctgttactaaacggacacccgccgatagttgtgttggagtgtcgtagtactggttggcagctagcgagttgccagtatcggagtcacgcacaaaaggactatcgtgggcgcccagatgtgtaatttctccataggacttggagcagagatcaggagagttgttgcatgctgtcgtgcgcttcgtctggaccaaagggttcgcaaggaccataggcaggaatgccagaaagttggatactcgcataactgtacacaaatgatgtattagatgtaccaatatacttcaagattagaaagaaagatcaaatagaaataagaaatagaaacacaaaacaaacagaaaggagacacaagacctcaaataaacaaaatatttgtctccaaggccgcgttgccctctcaactattcttagatcggtggagcagcaactgcactgccattgggccatttacaccaatcgacctcctctatttgtgacatagcccacttgtctaggcataactattgtgtacggttttatatatggtttttcttactgacccttgacgatcaatgtctcaactgcggggaatgacatacgtgtacggagtatgttgtgcgcagattctcggataatatgggtattatgatcaattatttacgtatttgctaatatacaggcgattcgcaactatcatagtcctttaagcgacaaacgtatacccggggcgcgtcgcttcgttctgcttgctcgtggcggattcaccaactgctccaagttctgttccatcccatcgaagagagatggatcgccccaagcctggaacacatcgttcaacacttgttgaaggggatacgggttacgccgtcgcagcatgcgattcatgcgccgcgctgacagaatatgatggctgtagagcatggccagccggtggcgaactgcctgtgagatcaatcgcttgtcaagacgaagaccggatttttctagctctcgaagaagaatcagcccccggacccatggaatgagcttctcgtccgtttgggaattaggtggggggatcgcaaatttcgatgcggtagtgtccaatactcggaacatgaagccccaagagacgatggcggcttgcatttggggggtaaagacgagatcgagcatacgccgatcgcgaccgtttgcctgcttggcgggatcaagaggggatttggaagatggaaaattcgcccaaggcttttgctccgggctttcagcgtattggcgaacgagccactgacagcaatctcggagtttatcccagtctgcccatgcgtctgccatacctagacgcttgagcatctcaacccagaatgcagcactgacataccctcccgcgggaaccacgcgctttagaattttgaagatgaagatcacttcatcgacggcagacaggcgttgacccggcggtgggcgatggttcattcgccgaggggtgagaatctgctcggccatgaaatccacgctttcttcgcccaaagtacgaccacgaagagctagctcgtcggcgaccttggatgccgcgctcaattcccaggctgcgatatgcttccgaaagtggatgtcgtacagatctggtgcgcccgggtataattctgttaacaccgctagagtcatattgtacaatcgccaatcccgggccatgtagtaagataccaacagtgattcctgcatacgcttgtcttcaagggtgtcgggatgctgatcgctgcggaggacatcggagaggagaatgtcgcggttctgagttgcaagtttctggactaagcgtgagaagacagtacttcctatagaaataccggactgcttaagtattttaagcttgtccagaagatcttgattaccgtgggctctcgtggctagttcgcgcaatgtccggtggccgatctctgatacgccgagcatcttcaggccaccaacgatcatatcgaaattgagagcacgagtggcaaacagtttagcacctatgtcatctttgaagggtgtttcgtcttgcgaccccttttccttggatttcggggctgtatctattgggccaggttgatcaatcgaagcttcggtatcaaatcgctttttgacatagccgcggagccgattgaactctttccgtagcccgaatttctcaacatattccagcaatggctgtatttcctcggggctttgtgggtgatcctgacatcgagcaaggaaatgatgcattgagatcgctgcttcgccgtggccttgctgcatgagcaccgcaattacagggccataaaaattatgctcgggcatcgtggagcatatgtcttggaatgcttgcaatcccggcgacaagggcgaccgctcgagatcagccaaagtcgcaaattccgtgccagccggaagagacgaatgcattgcagagggaagtattttcagcacgtcatttgcgctggctaaatgagagcgttgaagcttcttgtgccattcgactgcacgttttgtcaagccttgctccagaagtccacccaccacgcgctcatacagctgtggccatccgttgccttgttgctcccgtaaaatgacagcatagtcaagaacctccttaagaaaaagctctcgccttaatcccatgcccacaaagctttgccaaaagaagtccgcttgctctcctgcaactgggagccgtacaccatccactcggaccctcaacccttcccatatgtctagagtaccattgtcgccgtagtgacgctgacggtatcgaagaagctcctcccacagatcgaaattatttcgatgctctggatcgtccactaatcgcgttccaatatcgttgaggtgtccgacgttcgattcgaattcaagcttgtccggtcggagagacagaagtttgatagggcattgtgtcgtattattaggtgtttggctctttactagaggcgtgggctcaagggtgtttggttcattcgaggcctcaatgtcgtagatgggaaagctgaatggccgtttccctcggcatggatcctcaagctgatgccgggtgttattgtcgggttcctcgagtaattcttgtttggcgcttcgcgaatgacatcgtatacaccggtacctggactccaattgctcaattccgatcggtgttgctgtgagtgtgtcaaggatcgagacggcggacggcctcttcaacagtcgcagaagcgccgggcgcatgagtaattaagaaaggaaggtcgggaaatcaaattatcaacgtcaaacatccttctttgagctccccacgtcaatccaaaaagttcgttgtcgaatattcaaacgttgatacgcgtctgggcacttttctggcgcttttcccttttgggatgatgactagatgcaacgtctgattcgatcaggtgatgctcagcacgtgacacgatatccagctcattccgggaccaacttcacatccccatttcgccctcatcgtacctcacatccccgctccttcttcgcttacaaccgcgaaaatgttccgtgctactagctcccgcatggctgggtatgtactcccttcgaattgccacaataatcccccgcgcacaaacccgactttgagagtgcgcccatcgaatttcctcccacgatcttcggggtccaattacgattgacgcggctgcgggacctgtcatcccaccattaattacaatttatactgactggttctgcttagcttcgtgttccgtgagaaccgtgtgccctactaccagcgtctcttccagcaacacgatggcaagcgccaatggtacaaggtcagtacccgccggaaggggcatatgccctcaatgaagtttccggaagaacaagaaactgacattggaattgtctcgcagacctcccgctccggctacgtcatgtacccctacctcatctctgtctacggcctcggtgctggtgagtagacccgtcttccgatatgagatccggtcgaggatagaaactaatcgtcaatagctaccatgtacgccatgtgccgcatggttctcgttagtccacccagccgctacttctcatactctaacgagaagcacgagcgttcatatgctaacttctttacagggccacaagacttggtactaaattataggtctcaagacttagtccggcagagacaaatgatgccatttccagtttcgttggttattcaacctgcggcatcagttgttttttgtatggtgtatttctactccaggaaggggttagatgggttggcagccacgcagatttggagctgtacatatgatcaattcaagcgccaatcccagagatgctgccgtaaatcatttccctggtttcacagaactactggttcggtctcctcgcccaaattgggtggtactgtttttgatagaatagagatggttgtgctgtgactcgcaacagcccgaagccgagctatcttagctcttgttggtctagctagacatccaagtggtgataacacactgtctaggtactaagtacagtattgctcacatgtacggcagtggagagatatcttagttaactattcggcgaaggtcgaaatggatgactcattacttgcctcgcccaggccggctccaggcgtacaagttcattcaataatatctgctcaggacatatatggaacaaattgagtacagaaaaagctcgtagtggatgaggcaggacgtgctaaagacggttgtgggcatcgcaggattcaagcccggggctcaggcgccccctcggcccgcttccatgggctcacccccgggtgccccgggccgctttataattgattactcagctgtttcacagcccggccaattttatggtcttacttcctctggaccacaatatacaatggctttgcttgtgtgaacctgtatatccctagaagcaagagcatgcaccaatcatatatatatctcgatatagcctgtcaattgaggcaccgaagtacccgacccatgctcctataatgactgttctctttgagagcattgaatataacaatggaacacgagagcttcgcctattcagagagacccgctaagcgggttcgtcaagcctgtgagccctgcaggtaccaaacccctcagattgtttacaaagatagctgttaaccagtttcccaggcgtaagaaagctaaatgccccggagagcagccggtctgttctctgtgtgccaggctacggcaacaatgcctatacgccgatgaaaggcgtcggccacatcccgagttgagtccacgacccagtgattcagaccctcgaacatctcgggtcctggtgagtatttttatctctcaatgcaagcccgaagaaattttatgcaaatactgattccgtcataggaagatagattgcgaagccttgaaagcaaagtgggagaggttctagatgtacttgggtaagaacatacagaacctctatgtaagcaattacttactcttagaaacatgttgcagctcgaggagtgagccgcaaatacccacagaatctcttgtcccgtccgtgacattgtcaatgcgaagctcatcgattactctaccaccatgggaggagattattcccattgcggagctctatttgctatactgtgactctcagcctctacctcttttctacagggatagctttatttctactctaccaacacgcgaggcggagcttctttttgctatattggcactcgcctttcgcttctcgtacactcaccacagcagggccgattccactagcctgatcaatggctatgctgaagttgctcggggcctcgttatgaaaagagtctcagaagggccagtggagctttcgacacttcaatgtctttgtatcttgagcttggtcgactttacgagtatgaacctagcgtttccaacatttaaactcgagctaataatatctcccagacggcaatacacatcggtccagtatccacagcagcttagcgatgaatcttgcacaatgtgccaatatcggccaagagccccgttcgtcgaccagtaccatagttcgcgaagaacgcagacgctgcttctggagtatatgtcttctcaaacgactacacggcggcgacttcccaatcccagacataccccaatccggaggccctccatatccccaaagcccgacacgaccagcactcctctctccgggagcatcaaccgccgaaacacggcgaagtgacatgcaagacgagggaatcattgcatatgtggtaatgctgagcgaagtgttcgcacggacagcacggtacgtgcgacttcacgggcgtccaagcaacgtcccaccttggtctcctcattccgaatactccaaaattctcgctttacaaatggacctcgagactcgcatgccatatcttcataggttcaagccagccaacctcggggaacggtctctcgaggaattacagacacatcgtgaatactggggtccgtggtttctgaatcaattcatgtatcataccagcctatgtctactcaatcatccattgcttctctcgctcagtcttcggaacttccggagtaccatcccggagatcttcttgcagcacagctcagacttgatctcttcgcatacaacctggatcattcacttcatcaactgctttgaagaaaagtcatttctagtatcagatccattgctggggtacagtgccgccgttgtcgctacaatcgagctgcaactcagtttcacggatgatctgactatcagggaacataagcgtgagagattcgccaagtgtgtgaagtttgtgcaaaccatgggagaacggtggccgcacatggctcgactggtatggtcccatcttctggctctctcggtcaaaacaacaatctaataataccaaaaggcacatagattacagcgactagaagacgcagtatcagcaacctaccaatcagacccaggcgcgcaaaaccaaagcctcctgattgacctatctcgattctgggaaatcctcgaatactcatccaacagcgacacggactctgctcggcgtctatttggggattcactttatgtcggttcttcttccgcaggtggagaagtatctcagacatctcctttgcctccgccgttccgcttgagtgtccaggagcaagatacaccgaatattcggtctcagtcgttcggtaccaatactgcctttcctagtcaggactacccagcaagctctttggtctcgccgcagcacttgacgatgtctaatgatgagttctctattcttgccgccaatttcttttctcaggggcaagagttcctgcgcagtggtgataactgggagagtgttgggaatttctaagggcttggaacagcagacttcaaatcttgtgtgtctctacattttcttcgatcctgtgattgaatagctactagcccacggcatatcattcatggtgcattgcattatcatactcgacatttatccacatctcacaatattaattatcaactaggaagaggccaaagcgcccttgaattccttgacaaagttgaacacctcggagaaggtgttgtacaacggcactggcgccacacggacaacacccggctcccgcttgtcacagatgatacccgcattctgtaggcgttcggacaccttgtgcagcaagccaggcttgagcaaaacactcaattgagcacctcgagcattggggtctgacggagtgataatatcaaacagacgagtctgctcgtcggtatccttgagaagcaggaactccaaatacgccgtcagcttcactgacttttggcgtaaatcggccatggaggtctggtcaaagacggacaaagccgcacaaagacatgtcagatcaatgactgacgggttggacacctggaagcctccagctccgggaataggcttgaactctgctggtggtcagcatatgctagaatatgtatcgcgcgacacgagtaagaagaaactaactgttgtccatcttgaacctcaccgatcggtcaccaccataccatcctgtcaagcggtgacggaacttcggagcatctggtccagcgctgtaatcgacctggccatgtctctcgtgcacaaaaattccacccattgcgccgggcccggcattaccgtacttgtacgtgcaccaagccgcgaagtcaacgttccaatcgtgcagcttcagctccacatttccatatgcgtgcgccagatcccatccaacgacgaggttctttgattgggcgtacttggtgattgtggcgatgtcaaatagctgtccggtgtagtattggatgcccgggagaagcagcagcgctgcgctgtcggcatgttcatcgatataggacaggattttctccgtcgagatctcagattgaccctcgtctgggccaatgagaatcatgttctcctttgcatctaggtcatgccaagcaatgtgtgattcgatcgcatactataaacgtgttagcgatagattatcacctgcaaacatcattttcattgcaggttatcactcacatgatcactggggaatgctttccaatccatgagaatcttccgcttagtctcagtcggcttatagaagcttgcgagcaacaggtggaggttcgtagtcaacgttcccatggctgcgacctcttcaggcgcggccccgacaatgcgggacattgaagcagctgcctgttcagacagtagctgccattgtttcaatggtgagtcttcaagatcggtaaaatgtccacagacaccgatggacgaccaagtatccaactgagcctccatatacttcgatacggccttgggctggatacccaatgagttaccgcaaaagtacgtgcttgggtctgacgacagacctgcatgatcttgttaaactagatttcgcgtttccgcggggatatggttctcacctggctttgccagctttttcgtagcgagattcgccttggagggaatgatgaattggtcgcggaatccacgcagaggatccgccgcatccagagacgcggcataatcctgggatgctgcctctgcaggatagactggctttgataatttacccgtcatgttgcctataaatgctctcgtgaaatgcgtcgaatatggtaagttaagtcaagccgtgaagattttagttgcaaccaacaatgaggggaagagaagaataatgagtgcaggttggaaatggaattgctttttatacggcaagtaggggagcaccgaatcggagaccagggaccttcaaaggagctggcaatggtaaaccggacggtgttccgcttccgcctccccgatccgcctccctactgtttataagtggttggctacttccatggataacctatcgttacatcatggcttgacactcataacataaaatatatagatttctttctcctaggactatctgccatggattgtatgcattaacgcatgaatatttgcagatggcttgccatgcagaccacaacacgacctaggactctttgttagattggctatctcaagtatttcaatctggaccaatgtcgatctctaaaagtggtaacaggaaactaatttatgccgcaagtatgttgtacttttgaaattattcggtgttgaaccaacggagtcatactaagcctatctgtggatcacctcgcacagttataatatcccgtggagaggcggaacacggatatagatccgtatatcttccggattgtatagatcttttgactaaatggcccggtgcaagccgatgcagtaagatatttcaataatgagcccatataccactaagactattctcgcattataaacctaaaaggctgtcttttccctctgtctttccacgccagacgtgctcttcctcctgaacgaacactcctacacaatccattatccacaatgctgcaatcaaccgatactgttctcaatgacattttcgaaagctatgctgagcagggctttctctcggattgtcttccgctggccagacttgcaaacccctattacgaggcctgggaagatatagccagccaactcccgaacctcatccaaacaagccaaatccgcgagcacatcgataatatgcccgtctgcacaactgagcatctcaaaacggaaccagaatggcgacgtgcatgtgttattatgggatacctggcccatgcctatatctggggaggagaaacccccgaagacgtaagcactcaccaccgttcagacaaagatatccctaacatccagataacagagacttcctccttcaatctcaaggcccttccttgaaatatcagcacacctcgaacttcccgcctgcgccacatacgctagcctcacactgtggaacttcataccttcccacccagaagcagacatcacagacccggacaacctccacattcaaacctccttcaccggcacaaaagacgaggaatggttcatggtgatctccgtcgccgttgaagccaaaggcatcaagctcatctcgctgatgcgggacgctttcaaagcagttgctgccaacgacgtagacctactcactgccctcttgtacaggtttgccgatggcttatgcgacttgacattgactctgaaaaggatgtacgaacataataaaccggctgtcttcttccaccagcttcggccgttcttggctggaagtaagaatatgggtcacgctggtcttcccaggggtgtgtactatgatgttggtgatagtgatggggtggaaaggcctgagaattggctccagttgagtggtgggagtaacgcacagagctcactgatccaagcacttgatattttccttgggattaagcactctgcaacggatgggaagcaagcttgcggtcctagttttatccaggtaagagcatcacaagatcttagttttcagagtctctatcttgagacatatgcgaatcagtactaacaccaaagacagcaaatgcgagactacatgcctggtccgcataggcgcttccttgcagagctatctggtcgagctagtgttcgtccgttcatactggagtcgtcggttcaatcgcttcgggatgcatacaacgcagctgtgaatgagctcaaggctttccgcgatacacacattcagatggtcacacgatacattgtcatggcatcgagacagcctaatccggttcaacagggaaaaggcaaaatgaatctagccacggctagctctcaaatgaaggaagcaggcgcaaagactaagcttgctgggactggtggcaccgacttgatacccttcctgaaaaagaccagagatacggttcaagacgctaagtgctaggtgttcatatggacgtgggatgattaaacgaacatttgtgatatagaattgtcttgcaatattgtaaattgagattggttgtttgccgctagtactatagttcaaaatgaccttcctaaataaagaatcatgtcccgaactatgtagcgttggatacgtcctgatatccgacatcaacgacgagaggactgtattcttgtggaatttcctcttttccaggtgaatagcaaatccccgagtcaaccttcccgcaaacttggtatgaatatggtttggatgggattcctagtgcattcctaggaccctaaagcatggtctgcaatgtcccacctcgtggatatcgagaaaagggccccatgtgagtgttaggaacaaagctgcgatgacgcaaatactccagcctcgtggtcatagccggcatataatgcgatagtggtgatgaatttggtgcaaacagacaggttgtatcgtgtggtcaagcgattatcaaaagcataaagacacgaacttcgactgttcagagcagtagacatactcaaagtctcagcacttaggaaatctggaccagggtgatgagaattgttggccaggcacattctgggtgcccaaaagccaaccacacggcgatggcctggatttttggcttaagagaaacgcgtaaagcaatcaccgcttcttcgtgttggcgggcacaccctcactctctcgcagctcggccagatacctctccctcttgatcaaccgctccttctcttccttgatcatctgctcaactgtctgagtggcctcggccatgcgatcaagctcctttctctcggtcatccgactgtatgggttcccgggcgcatcactcatcggaatgtccgccgttctctgcgcaacctgcttggtattcttccccttgctcttgccaagctgaccaccagcaaagcctccggtaagtatctcgtagaacggctcgacgggctcattgaaaatgatctcttcgtagttctggctgaccacagtctctcgacgctccttcattccctctgcatctgggccgtaagggtgtagcttcaggctatgccacagggtctggggcttctcatttgactcgggcacaaagtaaagcttgatctgaatttcgaattcaccccagccagtctcagaaacttcgaagggcggatgctcgatcgagcgcacattgtgggcatatgtctcatgtagcttgaattggactttctttagccagtaggagatgtcctcgccgttgattccctggacgaatatctcccacctgtgggtgtgatctggaggacagtctgggggcctgttatcgggatcgaaggggtgcgctatactgccaaatactgtgtttgttagtttgtgactgttggcgatcatgcgctttttgcggacataccaaatggtcggaacaccgagacaccctgcgagcgtgttagttaatttaattgtaatatttctagagattgaagcataccctgacgcgcttgtttcctgtcgcagacaccatcttgtaagttgtttgtggtagaaccagatgggcatggtttgtccagagcagcaagggcgcaagaaaggcacggaggaaggataatccgccggggctcaagcctgacaaggaggcgaacgataccgaacaccaactttagagtcctggtcaaggaacaattaccttgaattatttaactattttgcttattgaaaagcttcatattgacttcctttgctcacccctaaagtctcgattgcgagcctaaatagctaggaatattgttccaattctttagtgacatcattgtccagagctatcccaaaactacagcatgccgaacaaaagactagttgtcgccggaggaagcggttttttgggtatgtgatagccagcgcagagtatcaatatcatttcactaactagctattccaggttccagaatctgtaaagccgcagcagcaagaggatggacagttacatcgttaaggtagctttcccacctatttatgaatctacggaagagcacgatactgatagctgtccagtcgatctggtgagccccggtgggacacagtcaccgactctcaggaacggcccagctgggcaggctccgtggaatgggccaaggccgatatcctcaagccagagagctacaagccacatctgcatggtgcatctgctgttgttcactcaatgggcattctcttggaagcagactacaagggagttgtgcaagggagagtgccaattctcagtggccttcaacgagcttttagtacatctaagctcggaagccagaacactctgacaagacaagagggcgaggctttggaaccaaaggagaaagataggcagctgacctatgagctgatgaatcgagattcgggtacgtacaagagttccaaagtctgtttcaaaagctaacatgtgtgtgatttagcaattgcactagcccaagagtccgccaatgaacatgttccgaccttcgtttacatctctgcagccgccggggcaccggttctgcctgctaggtacatcagtactaaaagagaagcagaggcagctatcatatccactctcccggacctacgaagcgtcttcatacgcccgggcttcatgtacgactcgagtcggaagttcacgctgccaattgcaatgggtggctttgttgcctcggagttcaacacattcctcgggaacaggcttgggttcctcggagctatggccgaaaagcccctcaaagccgacgttgtaagcgaagcggtggtcgaggcattggaggacgagtccaccaagggtgcagtcggaacaaaacagatcgaggcacttgcaacaaaagcctggagaaagacgatgctttaagtctgttggctgatcaagtgacttatgtttgtaaacaatgtttctttttttggcagaggggaaaacgcgtggaatctctgctggttgattgatgtcttgtccaagtacagctgtatatcttggaacgtccactcatgtaaaatatcgcaatcaatctcacatttaacttaaatcatagtgccacgttcgaagctgtcccgaatttcggtggtgtactagagaactgttagcaaaagatcacacaaagacaaagcaaggggacactgaccttgttgtagaagcgagcgagtttctggttgaactgcctgttcttctcgttgatatatgtcacatccgcgtcatcatcaccaccacggcgctctttacgtttcttgaggcgcacttcctctgccttctggatatcgttgaccagtctgtcaacagcagcccgatctggtttgctctccgtaaagccagtggagtccgcagtggaatagaagctaccgttcttgtcgattgcaatcatttcaccgtcctcggtctccacgatctcgagatcgccattggccgcggctctctcgatcgcggcaagcttgtctttctcgtaggactccaagtttggcgccatttctctcaactgtctcttgtaaatcttccgggcatcttgagtgtagtcttggaaagccacgtcatctcggtgacgttgtttcttctccatgcgcctatcccacttctccgattcatccactgtccagtcccatgcacgcttgcgttcaaaatcctcgccttcagcttccgtgtccgctttaaggaggttgtgggaggcgaatgcatgcttgcgggacaatgtgtttagcagggccgggtcggtggtcaaacgctgagactcagctgcagtctcttttaagttgcgttccgttgcatttttctatatggtatgtcagttatgtaaggggttggtctggccaagtctattgatccgcgcaaatcatttttggaagccacttacagctcgagcctgcaaggctttgaaccgattcattctctcgcgcgctttagatgcagcgtcatcctttgtttcatctgttcgggtttcggccttgtcttctgaagttgcgacaggagattcgctcgtgttctcggtcggtggctcaatgaactgctcttggctcgcctcgtccttggcggatttatccgcatttctggttcgaaccatgatttccttgggttaatcaataggccaatagcagctatggacagagagcggtaattgttttgttggcagctaggttgataggaaatggaaggtggttgaagatgaaataaaagcgcgaatgcggtcaattgccgcctcccacaccgcccttgatctgctggcgaaaccccagacttccaccccttatcgggccgtgtttatcttctccacatcttctgggatcagctttactctagtcgtcatgggagggctacacaatcggttgttgctgctgcaagccaggcaacggcttaacactgggaattttctgtcacggcaattggtgcgcagtctctatcccgcaacgattaaacgaccacatgacccatcaccgtctgaaatgcttcgattcgctttaagagattccactgagccaatttatgactcgaatgttaacgaggtcttatctgaataccttcgtgggatttttatcaccgaatggaagttgaatactccgccttccccgttgtggacctccctcaaagggcctacatcgcggaaccaagagttgttgtggaattccaatagcgacatcgccgatgtctcttccttgcggagtctaattgagagatatgtcaacgacagacatggagcagagattttgcagactaataattgtttaccattacatcacgctttgcgacgctgccaacgtaacaacacattggcagaaatcctctcggtgctacgtgacttgtttgcaaggctgaagcgtctccagcttcccatccggcctggaatgtacactatagcgttatacttcgcatctcttgatctttcgccttctgatctcaggtatttcttggatggccaacaccacatgggcgctccagctctaagtcccaaggaaagtctgcggatagtccgatattgctctgaagcacttgactgcaaagtttttgaagacccatactatgaccccaatcccattcttgccgagattacaggcgaaggagaatctgtgaccgaaagtcgcaatttgcatgataccttattctggacgcaatctactgatcaaatcggcaaccgattcaattatgagaccaaagcccaggattatatctgtttacttactaggcttggtaatgatgaagtgcttcacagatgctggtctcatttcttgaagaacattcaacctaagaactatcaaagctgcatcgctgcctatcaggtagtgttggctctggtccaaaatattcagtccgaaacagcggtgaaatggttggaagatatctctcaacattgtggtgataacctgccattcattgcgaaattcccggacattcgattcctccttaatgaccttattataggcgaggcactacctgacctagtgaggggagaggactacctcgaactacttaagttttgtcttgaggacatggatcgaaggatgggttttcaatggagccctgagagtcaaagtcatttcagtacggccttggacccaatctacggagcatttggtgatcagcctttacccaagactgataacaaatatgctggctatgatcatggcgggcaattgtatgcagagcttcgcgttcatggctgctccaggtctccggctgcactggccagggtcgtagatctgttgaatgaccacgatggacagtcgcagaatatcatcactcatcttgattacaatgcggcacggcttaatgaatttcggtccaaatttcaatctctggaactccgatgggtaccagaacactcaccgattgaattctctaactcccggattccggcgatacgtgatttctctaggcctatgaccccatctaccctaggccttattcgggctcgtttgatcattcatggagttcctcaaatggggatcgacaatttacatttgatgcaactcggctgcatggatatgcggtatggtccagaccaaccatggcagccatctggatatatcgtggtttgggaccgtcatcacagggaactcctcgggctgtatgttgggcagaacactggtgtcattagctgtggagcaccttcggatggccctcttggtgccttgatgcatctatcgctctcaaccaatcctgacgagcgaacattttatcctaggggcacgcgcactcattctcggaactgctggggtccttactatctggatgtagatccaagtgcagatctagagtattgagcgttttcctacagctctgtgagatatctatgaaatcatgaaatcatgaaaatgtcttttggacactgagatgactggatgttgttatgagtgagcggtgatgtgcttcggcagaattcaaatgtaccacaacgttgtagtcaccgggcatatccttttcggctactcttccatctccaatatcacttccatattctcaacaaacggaaactctacgatattctgcctcctccgactagaatccaacggagatcctacccatgtaccctataccctatgcctgatcggcctgcttccggcgtcctcggagagtgacatgcactgagattaattttccctgcattagagtcaagccacccaagccattttcaatatcaagtattgtccgtaaggatggggcacaccatcgaagtcttggatgtgcctggccacgaatggtaatttgtcggaatatctcttcctattctggcttacacttctcccctgcagcacacagtaaccgcagatcagcaacgctctcgaggcaattattgcagggaactataacagccagcgcagccacacttctacgtggcggtgcatactgaaaaaccttgacttgcatagtttctcagtcgcgctatatcataggacaattatcaaccaccaagtactgcagtggggtcattgtgatctgcgtctagcctaaagtcgacgcatgagaactgacctggaagctcacggggccttagttcctacacctgccaatgaagtttcaaacggtcacccttgacaactcctgcatttgcaggtcgaagaattccaatcccattattgggacagatcaattcttccaacattgcaaaatcttcacgaatagtccacagcattggcaacgcatatgatatatgtagccacaatttacggatccattatatttacaatagactgtatctagcgcctgggcccagttgagtccgactacccttagttcgttcgcctcaaattgcagctgcctcgccgatcgatctgacagcaaacgatcattgccccatccccaattggaacaggtgtcaaagtccgcccgaagacccataattttgggggggtgcaatggtaagtgcattgtcctggaatgttaattgaccttgaattccaggaaaggtatctcgtgaacttgctagtttatatgcgtctgtgtttcctccgaaagggcttactgcttaccactgtcgaaagtatactccgggactgcatcatataccaggatcagcccgccatcacggtaagtcccagtgaacacagcttccagattccctgttgtggggggaggggcagatctttttttctgaaggattgccaagcaacggttgaacgccaatcaccgcgcctcacggcagcttcccagctccagccacttgggatttgaaaaccgggtcgataccagctggctgctccgaaggcttgtcggtcagcatccggcaaacctgctgttctgtactctataaagcggagatctgagttttctgctccaaagcccattacaccgggggtactgtttatcattttcgacggactaagacacgatagtccgccctatggtccaattcgtggcccactgcggagtactactccgtaaaccggttcgcaaaaaggcatcattccacgacaaggactttgtcactttgcctcgttttttcgaccccattagcaatatcctgataggtcaaaactgacaacccgtatgccgacacgagatacttcagcgcaccccggttcccagggaaagctttccagctgtacacgcgagttccacaatgcagaacagcttccactcatattcgattgcctgaccgtctttcaagagatcaaagaccccgagtcggggaccattttttctgccaggaacagtgccagtccatttagttcatatagctcctccacgcaccatttcccatggaggcacagcccacacctatgtccgcagcagacgtcttagtactggtttccccttcttgtggcaaaacccgctcggcccgttcccccggctcttccctttctcatcatcggtggatacggcgccaatcgtagagcatcagtcgaggatgtgtttctactagaacaagaagaagtatactgttgatgccatttgctattcgccctcggtccctgtcatattccagccctcgggtgattggacagctcgggaaacccggacaggggtgtttaaattttgcgctgtgcgtggacgttttttttcggtccctgaggaaacccggtggccaacgaataccccctagggaagtatagatccaatctcacagggccagcgaagaaaaggatcatacccaagtcgtgtcatgaggcattgctgttaaccggctgcattcacatgccgattatcagatgctttcattgaccgaatatgtttatctttcccatccaacctatataattatatctgggacattggctctgttctggtcgtgattatctgatcgctttgtgcgttatattcaatgcctcatctgaaaccaacccgaatacggcaatatctaaactataacacaaggaccaactgtcggcacttgcgcaaatctccgatagatgtcgaggccaccgccacagcaatgtgggaattccacatcggagcggccatacatcgaatcggtcccccgcactcaacaccgcggcccgataccaatgccctatccataccgacatgaacctcgacagaccataccccagagcacgagctatgagcaccctatgcacggggcgccccttggcccaaggcttcctgccttgattgttcccgaaagaaacgcagatccacgatatatgctctcgtccgacattgcctacctgaatacacaacatatgtcccaaacgctccctctgcgatcccatcaccaacctcctggaagctctgatgcccgtggttactacaacccatacgaagagagaacgtacccaagttcgagccatgcccgtgactatgatagtcaccggagctggacatacgacgtggagtcccagtaaagtccctctcttttcgtttctgtcgattaaaccacctctatctgtcagtcatccgtcctgatgcgatgtctttggcttgagaattttgaacaaaatcctcctctcacgtcacatctgtgacaggttacacaaggcagggagacattcgatcaagggccacattctaaccgcgaaattcatatagacacagcaacagttccacggccatgcccagccccgtctggtcagacaaaagtgcagctacgcacgcattcaatcctatactagccagtacccaccaaggtccgaaaccacaatcccgaaacgcgaactacagaatgccacatggcttcgacaagctcctccaccatgacccagagccgcaatcaccatcacctcctccacgacccagacgaccatccaccgaatccagataccatctccacatccggcaacagcccatcgccgcacgagcctgtggcgcaggcgacagagaccgccgccccgtcgacccacctccaatcgtgcagatcctccttaccgacttcgactcgaactcccaggaagaccgggatctcctccaagacccccgcttcacagtgggctgtctactattccccgtctcaccctctttaccatgggccgagccaacagaaacacatccgcgcgagcgcgaccagaatcgagatcaagatcgaaatcgcgatagagaacgagaacgagaacgagaaagagaaacggacggcgttgcccgtacagacgacaacttctcaaccccattactgtccggcaaagccttcatgtcccctttctacgtcgacgccgacccagaccccaactccgcacccgcacatccatcctccataaccgatgcccatctagacaacccccctcaccacgcctacaacaatgccgcctcgcgcctccaccaaccagctacctttttcatctttgcggatctctcgatccgctcggcggggccccttaaggccccgtttnnnnnnnnnnnnnnnnnnnnnnnnnnnnnnnnnnnnnnnnnnnnnnnnnnnnnnnnnnnnnnnnnnnnnnnnnnnnnnnnnnnnnnnnnnnnnnnnnnnnnnnnnnnnnnnnnnnnnnnnnnnnnnnnnnnnnnnnngcggtcggcgggcctctataggctccagttccgattgatgaattggggctctgttgaggatacggggcagtcgatgccgattcttgcggaggcgtggtctgatccgttccgtgtgtatcctgcaaaggattttccggggatgagggattcgtcgattcttgccgaggggttgaaagagcttgggtttgtagagttgaagacgagggggcatgggaagggaaaggggaaaaagaggcggtgattggttcttttctcttctcctgttgtgttgacattatcatccttcgaatatcttgattgttggtttggagtctgaatggctttgtctcgggtttggcacgaggaaaggaaatttgattcgaggatgaaacagggattgcgttcgattatttccttcgaacatgacgacagttctggtatcttactggcattttggtttctctttctgtcgtttcagcttgggatacgggctatatagaagaacagatatcaaccaaaggcccaaaaagaaacataaagaaacattgctatgatacatggtggaatacaggccaaaaaaatttacagcagagatataagtacaacagctctaaaccacctacgcaagcttcaacagcttaggaggcagaccagggttgaatgtccggtcttcccacttatccttcatctccgccaggcttttcttcgacaacgaggccggaagaccctttcgagcagcaagcttgtacatctcacggctcttctccatctcgccatcctcgcgaaggagcaaggccaggatatacccagcctcgttgttccctccatcaaaagcaagctcgtaccaatccatcgcgagcttgcggtatgtcttatgatccttgggttggttgaaaaacgtaacaaccccactcgctatagactcaaagggtttcaaccaggcgctgcgcgcagcattagcatcttccctctcttttgccttcctctctgcttcggtggtaaattggccttgggaggtgaggtaataaaaattagcaatgtaaaagctggctgcaatatttccccacattgcagcgccacccatgaacgcctcgtacgtctcgtacttgttgggggcctccgtttccaacacggagatggcgaaatcagccatggcgatcgggtcgtgaaactccgtggcggctcgcgcagtggccttcaggatacccgctagaccctgttccttttcaatagccacagcgtacatccgccagggcgattcaaatgcgcccgctaacgttatatcctcccacaaggaagggcgtttgctagagggttgcagatatggcagaatctttcgctctagaagctgggcggcttctgcgttctcaccgcgccagatgagcagtttggcatatagcataatcgcatgagggaattcgtctttaagagccaagtctttgacctgcgctatgccctcagtgtttcggtaaatgtccacacctggcgtgctgatataccggttcacgaggtgaacaatggctcggcgcgaatgtgcttttgcgcagccggtcaacgcccattggtagacgtggtggcctttttgaagatctgcaagaaggatcgagattcgataaatggcgtcgacatctataacaaagtgcataatcagtacagaaccatttaatccgtagcgtttcactgtataccaattgaagtctgaactcacctattgagatactccgaacaagactggcggtagggacctgcgagtgcgatagcctgatcaactgttcacccacggacacgaacgtcgccaagttgacgcccggcggtatgttactttcataagcttcatacattttgcgtgcaaattgcctgaactcagccaacgttggttcaacgtgcgcagtagagtgtctattccaaaacccatcacggtctattctaaatccatcttcggtgaccaacacatgctcgggtatcgcattctgtcttcgaacagatggtgctcggcgagaaggcctgacagctgatcgattttgagtggtgtggaagggtcgtttcgatgtagttgtgttgctattggtgacagctcgagtggtgcaaacttgcgcgccgtggtgacgcaagacatgggcttttggagagagaacttgatgtaatcgacaccattgtaacggcaaaatcaatggtctggccatgaaaacgagtgagggaaatcgtgggggtggtagggtgaggggaggttttctctgaagttttggagttcgggaacttcaccaaactgctccgacatttagatctaccaacctgacgatacgccagagtagtatttaaagatatttactgattttaaagataatagaatagcattgatatgctaaatgcatcaattaaccaaacaaaccctctgtaccagacggtctcagaacacaatgcgtataatgtacattttgccttgatctgccaggccaaacacaataaatgctcaacaagatctctcaaaagcaagaatttaaagagataaagagagaggaaaagaccaaagcaacaacatcctccccgactctcttcccaatctatccgctccccgtgcctaaataataacacagcttctactccatagtcgccttggctccgatcgccttgaacgtcgcaatgagcttctccgcctcctccttgggcacagactccttcagaatctttggtgcagactcgacgaacttcttgctgtccaccagcgacaggccaagcatggtcttaatctccttgatgaccttaggcttggaggtaggctcgaaggactcgagcttcaggttgaacagcgtcttctcggcagcggcgggagcagcctcctcctcctcaacagcagcagcggccgcaccgggggcaccaccagcggccatagcgaagccgccaacgggaaggtcggggatgttcaggcgagtctgtgcaaacattttgattagcaatagttcggacatttatgtcaattgagtaaaaggatgatgtagatagagaggtatgcacggtccgcatatcctgcttagaaacccatcgattatgtgtagtttgtcgaacgcaccttcaagctagacaccaggtcggcagtctcgagcagcgtcaatgtgctgatctggtcgacaatctgggagatcttggggttggtagcagcagcaggggctgcctgggtggattcgcatcgtcggctgctgggtgtgcgacgggctgtgaggtatgtagcggaggccccgatgcgcagggaggacgggcggacggagccggagagctgtctagcacagcgggctgcgacctgggtggagaaggacatggcggaggtgagaaagaggcgggaagctcgagagaaaggaaaattagacgaaagtggtggggattggaatcgcggctcgtcgataccaagaccgaaaggaaacactcgaggaaaatctgggagtggcacgtgatgtatagtgcctcaggcatcattgtctatctagcaggcaaacagggccgaagcaccaaacgtatgatcactcacgatattcttgtatgagttctttcattataagatatctttgtagtaatatagaaggagagcagagcaaagaaaaaaatactagaagagaaacgtagtccaatttacaatggttctcgaaaagcgtatcatcgtacgaagatctataggcctcatattatcaaacagcatccagaccctcatcgctcctttttttttaaattagtcctggtcccaatcacctccaccctgcggtggcttggggcctcctgcctgtctcgagacaatgatctggtcgacgctcagcaccgtccgggcagcctcactggccagacgaatcgcagacatcttcgtggccataagatctagaataccctcctcgacagtgtccagggtgccgtcagattcgccaatctcaaggtccacaccggtagtccagtgtggttcctcctcttcagacgagctgccctccccctcatcctcggaagatgattcgccaggggcagtggcgcggtggtgcgcagtgtacagacgcgagagaacttcggtggcatctagaccggcagactcggcgagtgtgcggggaatgacctcgaaggcctcggcgaacttgcggatggcgtactggggcaaaccaggggttcggtcggcgaagttggaaatgcgctcgacgagctggatctccgtagcaccggcaccgggcacgagacgggggtccttggtgatggccttgacgacgttgacgccgtcgtcgatggcacgctcgacatcctccaggtggttctgggtggcaccacgtaggacaatggttgctgtacgggtaatagcgttaacatcctcctgacggaagacagtcactcgatcaccgccaatctcggtcgtctctacaacgtcgatatggcccatctcatcgggcatgggggcacccaggcgagccagaggtgtggcaccgacaacgcggcacaagcggcggagctcgaacttggacagaatcttaatgacgaggatattgaaacggttgaggtagtgcatggccaagtcgccaacagtggagccagcaacgaccacacggaggccggaatcgtagagctccttgatggcaatctccagacgatcctcctcgcccgcggtgaagtccatcatctccttggcattcttcaggagaactgtgcccttggtctcggtctggctgatatcgatggggcagctgaaaacgccgaccttggccttgctggccttcttgatggttccatcgggctcccgggggaagaccatacccttcaccactttcgactgttccaagctaccacccatgatcttaacaactcgcacgttatcgacgttgaagttaacggggttcttgggcagcacagccagaaccgcctccgcaaccaacgcagccaacacgtcctccgtaccagactgcttagcagccaccactgtgcggagagccttgctcaactctgttgccgatcgcatatcctggagtctgtcgacctcgagctctagatggaatcagaaacggttccctcatttgtatatcgacaaaccaatcatgggggggagggggcaaaacataccctctagaaccgacaaggcaaagatctgagccttctcgtatccggaaacaatatcactcgtcttgagacccatacggatcaactcctctgccttctttaacaattcaccggccaacacgataaccaagttggtaccatcgcccatctccgcatcctgctgctgactcgccataacaagcagcttagcagcgggatgaacaacatccagctcacgaagaattgtagccgcatcggaggtcagaatcatcttttgcaggtggttaatgacgatcttgttgcgaccataggggcccagggaggtctggacggttcctgagatagcctggcaggcttcgatgttacggataacggcaccatcttcagaatcgtggctgtatagcagaaaatacagatcagtcaattgctttgcttctttttggaggggcgccagataaggaggtccctattgcggtgggttttcgggcttcccgacttttcgaactcacctctggtacccggccttgaagagccccgcctgggagggacctggaattgatagtgacatgatattaggtcgcgtccggttgagatgcgactggatatcaaatgggttggatgtgagagagttggagctgttgtgccgggcaatttttggagctgcggtggtgggtttgcttggtttgcacgagggggagttgcccagggcttggcgctcagtatagatcagcttacgagcctaatccttcaagttttatatgtttttgctgtatattttatgaggtgtgttatggagatgctctcatgtttattaatacatcgcttaatggtattatacagttaccatcgctctattgatcatctcaaatatgagacatgcgaattataagcagtgtggaaaccaggcactagaaatgttagcagcttagtagatggaacgaagaaaggaaaccttactgtatcctttgatagagttgcatccattctcctcgtagattatgttggccttgtcgagcctatttagtcgaattagtaacaaatagggcaacgcagaggaaacggtcataccatccttgaatagcttccattcggttgtaactctactataagttagtaataaccccttcaaacaattcttcaaacctaccgatgggtgagtggacatgaattgtggaggagcctgtttctcctgttcatacatgcgagcccatctagcaagtatcagcagagcccaagacgatggcccattctatcatattgacttacagtttaacggcagcctcggggttgaaacaggctctggccatcatcactgacaacaatcattagccacataatcgtaagttgatccttaacttcaagggctcatacttagcccgatattgtctgcctcggcctgtagatagaaattagccaagtgaccgtatagcaaaaaaacagacaaaaaaaaaacaatacctcttgcgtccgtgagttcggcaagctatacatgagattcaaaagaaaagaagaaaactgcccggagacatcgaacaagaaagagatagcgaagacagctcctagggtaatgaaactgttgctcacacgctcagccggatgatgagccacaacatgagcaatctcatgtcccagaacagcagccaagccatcctcgtctttgcaaatgggcaagatacctgtgtaaacgaataccttccccctaagcgaagcaaaacaacgtcagcgatgtccaccatagaatccaaccatcaacaccacaaacccaacagaacctacccagggagcacaaaagcattaaccattccatcatccttgataacatgaaccttccaatcagcgccctcaatattcacctgcggaatcaaccgctgcagcacgccgtcaaccatacgagtaagaggatggttgtggggcaggatcttcccacgctcggaactgagtacctcgcggtagctctcttcacccatatttagctcctggtgacgagagacacaattgaaccgtcgtcggccggtcatctccactatctccgtgttgtatagataaagtccggatatccccacgccaatcgcaacaaagtggtgcggctttgcattctgcactaagcggaagacgaggggttggcgggcgctgcctcgaaatcggttgtattggttgcgtctttgttggtagggggatttatggcttgaggagaaggtacgccggttgcttgggcaaggtgtgggaaatgagagctgtgatcgcggtcggggttgtcgtagcagagagggagcccaacaaatagacagctgaggccctggggtattgtatgagcgtgacgtttgagctgctagtgaagcggccttgagcttggtggagggcttcggcgataagaaagggtatgcgcatgcgctgcgaaaagcacgcgccatagattgacggagcatggtcgagaacctgtctacctctctatgcaaatgccgagaaggagagaattcaagaacttgcaatgacctaggtaaaccagaccttccccggggaagttgcatgaaggttgaactgagcaacacggcgataagcagccactctccccgttttcgtgacatcggggagcaacgtcatgtctccagaatccccactctactatgaggatatcctagtttcttcttcaaatttagtcttgacatagtttaccgttcctctcagtacatacatagacaggcctacgagttgattcacctaagaaagaacagtttcgatgaggtgggtatgtactaatccaaggcaactcatagattcagtctagcaaggctggatgtatagaaaaagaaaatcaagtccggtaaatcgtcatatgttcaaacaagttaaaaaaccgacagaaccccatcccacccgcgcaccatagccgagaccgtcagcaattacatagaaacagagatgttatgtccaaatacagcggaaacacatcaagaacaaagcccctggtatcatgttgggtagtcatgggaacaaagtggtatcatagggatggcaaaagaaatcgcaaagggggaagaaaaaggggaaataacacgtcgactcggtatgtaaaagtcaataatgtaagacaaaggaaagcgtttcaaaaaaaaaaaaagtcaacacgaagaaaaaaacgtaaggttatagagagttaactccctactcctccgtcaaagcatcgtcgccagtctcgcgccagtcttgggatcgctccgtcaaccgacgcacaccggagacacgctgggcccagtgggcttcggatggagtgcggaaggtgtaggcgcgctgcgaggagatcacaccaatgctttgtagcactgctttgcgtgaatcacgcccgaagactgccgggtggttgatccactccatggacgattccagatctgcgttcagggcaatcatcgtctgagtatcgaccgcggagggtggtgtgatagtgttggtgtcggatgcggatgaatgggttccactaaaggtagatgatttaggagaggaggccaagactggggtgtcaccacggctgtcggcatcgctgtcggaccgggaagcacccgggggcagcggtggtaggccacccttgcccaggcccttgagaatgctgcgcgtttcgctgagaaggtgcatcgcgcgatcattctggccccgagataccagagtgagagcacgggtcagcatgtcggatgttagaagctccatacggcgctgcacaatcgaggggtggggaggaattggtggcgtaggggatcgatggcccttggcccgaggattaggaggcagcatagtaatggccaggagtgaaggtcgaggggagtgcgtgagatggccatcacggaggaggtcgccgtaggttaaatcagcctggatcaatggaacctcttcaacgctcatgactcggctatcatcgccatcagaaccgccgccgagagcctccaatccggagactaggctctcccacggatcctgcggcatgctgtcctgcgtggcattgtcaggctggatgacaagttgaaccaagacgtcgcgtttgtcaccgaatcggagatcacccagtgcagcttctgcatctttaccagttgcacgctttgtggtgtgaagagcgccgctaatcttaacaaacttggcgggtgatccttcaggtaggcggagcttcaacttgacgttttggtgggaggttgtctgcaacgcgcccaggcatccagcaacacattctcgcaacatcatccaatcctttacatacaagtaagatcccttagtacgagtagacaactcaatcatggtatcaggcttatgggtcaatccaagtccgaacgagtggatgttgaccttggcagcttccgcgcgggagaccacgaaatcaacgctttcggggtcggaaatagaagagtcgctgatcaaaaggatggttgagatggggttgttgaatttgcgctgcatcagaagatccatggcgacattggcaccttcaaccacgtctgcacggagacttttttgaccaaccggccgaatcgattcgaggatcttcgaccatccagcccagggcttggtggtcataccaaccaggggcacacctccaccactcgagccaaaagtcacgaggcccatccggtcccgagggccgagattctgcacgaggaatttgagggcatcacgcaggagagtaatcttcaagccttgcatagatgaggataccggaattaccacgacaagatcgaggggaatatgaatagtgttgattgcagggaattctgattcggggttggtgtagtctgtaatggcggtattgatggattttgctgcgccgtaagacgaattgatagaagcctgtcgttgaattccacggttaccacggtagtcatcgtcctccgcccccgagttatcatagtcatagtcattttggcgtgaattggcttctgggtgcaaatcgatcaaagaccgacgccacgtcttcagctcgttgcgattcttgaagcgaaggtagaaacagggcagctcggtgacggaaaggttcaaggagagaacaggttcatctggggacacctcgatggactttaaatgcttcttaatcaaaattgagcccttgagactgcaacgaacaggcttgcgtcgtccggtcgcatcgaattgggggtcagatgattttttctccttcacacagataagcatctctttgaaaagatagcattctaactcctgccaggaatctcgatccttgcccacgcgcatgtgtccgtggaggcgcagcttgccgaaccggttgaattcaagaccgtgccaattgtccacgcggctgcgcaattcctcagccacttcttccatattctctgttggctcatactggattgatcgagcatcctgtccaccacctgatcgtcccgcgtagaccccatccggctgcgattgccccgaaggcgtgtgtcgtaggtcatctaagtccggacgccaattggcatctggcacttcgaccgtaatcagacacgtgagggtctgctgttggcgggatctgttcaaagtcgggaactcgcttcggacggtgactatcggcgcgggaatgggattcttggcgaccttagggcgaggactgaggtctgactccatagcctgtacatcataatcatggcgccgtccagtgctggtgtgctggccttcattgtattcgcccgatgagccggccgcgctaccattccgggagtggggttgacgaggattagaggccacagtcaatcgatctacgcgctcacgctggctgctggtatcacggctatctcgccgactatatgatgaatctctcgatgggttgtaggattgttcttttggtgaggggtgataagatggctccctcgttgaagggttgtagggtggctccctcgctgaagggttgtaagatggctccctcattgaaggtggctccctcgttgagggattgtaaggtggctctcgggtacccgacgtgtaacgactgccggtatcacttggtcgtcgacccaactgttgctcccatggagttggtgttgtcaagccactgcgtactgtagcggtatcattcgatgtcactgagcggacaatattactgattttctctggggacaatcacattagccttctgagcccctctcaaccccgcgcgagggacgtaccgatatccaagacatttccaccgcgacttgtgtccaaggccaatggcgcattgcaggttgggcagtattgaccatcgcattcccgcagaaattcatagaaacaggcctcgtgggagacatgggagcacgagagctgcaaaacacgctcgccgcgtagggtatgctccaagggttcctcgcagacggcgcattcgctcccgacaaaggtccggtccctccgtgtgtgggtgcgatctacctccattgggccggtggtccgtcccgaccttgaatgaaatgatgcccgagagcgattggaatgcgcagattgaccagcgagttccgggtaagcagaattgatctgtccggcgacagtcgaggttgctcttgaccgggtaagatcggcctggttggaaagactgctgctaggtcggtctatcacgcctcgagtgaacgaacgaaatgaacggagaggtgaacgagaggatgattctggctgcaattgaaattctatacgtcaccggtatccggttagcaagttgggacctttcaaggctaatagcagattgaggtcgaagctcaaggattgaagatgtggatagaagagagaataaaaaggcgcaaaccacactcaggggagagtggttcagtccgacctgtcccatgaggcatctagaaccggccacaatagtctcagatctaggacatttggccctagactgagatactggaagagagacacagaacacttacttttgggctttttggatcgacctaggagacccagctcagttagatgttgttgagttgagtcggtcccagagttgtcctccgatctaagtgaacgtttccacatcgactctcaaaggaaacaaagaggtgggggggaaaagaaggaaaaaaaaaaaaaaacaaagcaaaaggagatcgaaaagtaatcaaaaaaggataataaataaaaaaacaattaaagccaaatacaataaaaattaaatccaggcatttcaagaggtaatagtggtacttcgtatacaaagatgaagaaagatggagctgaacaggggggtacacggagtatacacaacacgttttagagtggacacatggttaactgaaagactaaaacagaaagagaaaaaaagaaaaaacaaaaaaacaaaaaagaaaccatggaattggtcaagatcttgggtaggacaatagtcccaccctcaaccatgggtttggaggtggagatcccctgaattaattgaatattttacagtagttggcgctactgcaccccttattatccgccttatacatagtgaacgagtgatatctcttcttattccatcttgcattccacggctccgtgcagagggtgaggtggtaactagtcaatgggtcctcctactccgtaccttggtccttcaatgcaattgtggtcctctcggggtgacatcggatatccgatcggctttacaatccgcttacaacataggggatctgatcctggaatcgggtttatttaatttactatggagcacaaatggagtagtacctggattatattactataactattatttattaacctttggactgattaacctcttcttctgcatcttatgttcttatgctataccttgactctaaatctggcctctgtctgggttcatcttttccatggactctagatacccaaatatttggcagatccaccaacctcggggaattactccagacgttccaaaagaacatttgacatctggatccgtgagtggtgataacaaggttggctagtggatttacttcggatcggattaacttggcatacgcgggactaagtaccaatcagtcacgtgatcgaaagtggctcatatatccgctagtcgtatacccactcaatattggctaaggaccacgcgcctggaacatcggacagtggcaagtttctctgtcgatccaacggcttcccccctgtcaaaaggtttggctctgaagaattatggaaaccggagatttatttttttgtcaggcaaagtcattctgcaatgacgcaatctctcttcaacttcaacccttccagggtttaccccagctccaagctctccctgctgtcggtgatcgacatctggatcatcaacaaaattggtcgggtccggatgtcgtgaacgcagtggcgtctagacgcacctccggagctttgacgatcactccttcaacggactccaacggaaagtttatgtcatgagcaacatgacggagtggttatgacaatctccctagctcctaccacaactgggtcaacgaaaaagcccttggcccaattggtctggctcatcttcgctttcactcctgagctccctcgtcacgtctgcattggactccggcgggtctatcctgttcgtcacgctcattagcgcttagccatctgtgctaggaataggagaggcgaagctagaagaaattggcttgcacatcattgactgtagctcccccgtttatggatcataccggctgccggggtgggtacgcatgttgtctacgcggtgatcgacatactcctgtctttttggatactgcagagcgtctgtgcttactttagctacttctccactgtctcagaaaagccgtctagacacaacactgactactccgtacggagcagtagatgacgattggcaacgcctcccccttttgaggtggaggtttgctattgtatctattgcgaactatgcatgtaggcacgccccttgtgctggtctgcacgtcatcctgcgtcggagaattgtcatgcaggataatcgagactgcaacggaaagtggagttgactggtaacaactcctcactgctcgtccctgagctgtcacttagcatacatatccggctattttctgcattcttacaataatgatccatatcacgatccacatatatgtactttgtacacgaagcgcatagatcactcaacgatcatgaccgttgaggttttcagagcggagacaatgtaaacacagtctaactccttttagcaggttgatcttttctctcctcccaattctgaggtacctatgaaacactggtttcagagtacgagctggtcgcttccttagtgcgttacaagttggaagtggctcaagtggcttgatcccgatgatacagggctgcgatatggcacgctcctagtttgtgcatcgtaagttttgaaaggcgactccctggtctttgaatagttgtatgcagttgagttatttttacgtgcaggtatatgcaagtggatgcatgtacatgcaggtctcattggccgggccgatcccgagacctgatgatctctagcgcataaaagactcaagaccttgaggttttggtcaactttggtaaatgcagacttgcagctccaacgtagcaacgaagatatagatcctttcgggttggctaactcaaagccgacttctatcaaacgtgtgatagacccgatctatagtctactgtacctgaaacagatcgtctatgcaagtgaacgcttcaaatccatgaagggctcctgaacacactcgttctcacacatatcgactcacacaaagtacataacgaggtatctcatggtcctacgcgaggatgtcttggatcctatcagcccgggccactaggattgtctcagttgaatcaacccattatcttatttgcaagacttagcatggccattcgaataaattgtaatataagttaatataatttatatataaacttgagccaatgcgcgaactgatggggacgtagcgtcattcgtcagtccaaccccatacaacttaacgacgtctagcgtttttttttttttggatctatcgctttcgtacttttgcagcaaggtaattttggacatgtctatcgtttactctgtactatttgtgttgatgtttctgacacgtatcttcttagtattagtcaagataatatgacatgtctgttcttgtctttgttcaacggctttaatcgtgcctctgtgatgtgtcgagttcatacttgaaacagtctatacaatgtttggcgtaacaacgctcacgcttgatgcatgggtgtcgtctgattggtacggcagaattgtgttatgtagcccaaagctcctaatcaactctgacttatactagtatggtcagtatagatagattcgaagttcagaataatcggcttgggtggtttcatgatctaacatagagaatgtgacatcaaacaaggtgcaaatcattgttcaactaatgcactggctagttcattggtttttctcatacgacgagctttttcaatcttgaatttgtcggaaacggcatgcttgagcaattgcttcaagaggattctctttatgactatccatggatggaatcaatttcggctttgggtgagtacatgtaggataaacacgatccatggccacactatagaatgcctgaaataatcatttacaggaagtaagagatatgaatgtattgtttcatttgataaagacaagcaaagatcaacccttgcccgagaagtgtaagtgcactttctcaaagctttggcgaagatacatcaggtgctccaaacctcggacaaagaatttgggcatagaataacatgtctaaacccatggagagagaacgtccgccagatctcctcatatctccatgaataagagcccaattcctcggttcatttccctgcatcaaagcatccacagaattctctctcgcagctctgactcgggtcggccggtcatttgcatcatcaggccaatcgactcctccactccgatcctgactgtgcggacttcttcgactctgaccacataacgcagtccatcatcaataacaaactcatcttccagtctgatcaagccttggtagtgagcgctgactctgtgggcgtcgagatcatagaatgcgcaattgttgttaactgaaatcgtgccgtacacgcgaatagttactttgacatccgggaagcctttgaagatattggcaaaggttggtccgtcactggtgatggagtcccagtggttcaagacaaacatgatgtcgaggccgtaggttcggccatacacgagtatgtcggtcaaggactcgaacgagtcactatcaggctgcagaggggtgatcgatttatgaatcaatgggcagtagcagtaggaacggccttccagcttcccatacttgcgcacatactctgcctggagctcaatcagggcggggcgaaggtagtacttcagttggtcagggtcgatacgtgcggcagggggagcgccacgagcaacgaacacaatcaggggctctgcagtagtgatgggggggccgatgggaggaccggtcacaaattctatggcagcgggttccgccatatcgagatcagtgttacttgatggtttgttagatttttgaccttagatagaggtatggtacaataataccttagtcacaccggttcagaagctgatgcagagaaaggaaggacaatgagggggaaagcagcatcttaaacagtaaggctcggcgttcattgctcaacatgcgatgcgtgaacaaactgtactgctatgtggagggtgaataactgaagtcaataaagccaatagagcatcctcttggggtcttattgagctaaggatatagattctgaaaggctcaaaaggattagggagaaggctattttgccttttgagcctgtcaatggttattcctctcaatagtcccgaggttgacatcaattgccttttgatattcatttgggagtcttgtcatagtaaaagcatacatatctcggaatgtagtatatgcgagtctgttcttgtgactgctactgtaattatttatcaggttaggttcatgttgttaatagctcagtcactgatatatcacagccttgtatatattctgctttacaagactatacattgtttgtgaagcttgttaaagacagaatacttcacctataggtattgaagaagtaactagtcctctagaaaagcttgaatttgatattcctatcaccgaagggttgaagttgcgatgttatatagagatgcaccgcaccgtggagatatcggagatcaaaccccgaatagagtccctagaggcagaaatgccagttgttagtcgggaaaattcatcgaatacccccagagacgttgccaaatacaagaagacctcaaatatcacagtattcatgttcagagagcgaagtactttcaagcatcggacccggcctgacttcgctcaccgggcggccccgatctggaagctgactaagacggcaaaagtgaagagagttgttgggaaaaaggtgcatcaccttcaacataccatctccaattcctttacaaaatgctcttccgtgccgcggtccgtcaagctgcgcctttgaggcgtcatgccttcactcctcttgcccgtcgcactgttaccaccgacgcagcttcagctaacgtcgagagcccactgcctgatgtatgttagccctatccggaaaactgaaactgctcaatctttgtagggtttccattgctaatgcttgcgctataacaggaggatcacaagctgttcactgtccgtctctccgatgagagcttcgagacttatgagctcgacccacccccgtacactctcgagacctccaagaaggagctcaagcagatgtactacgacatggtcgcgatgaggtacgataagcatggcatgggatctttgatgtttgagctagccgctgactgactgtgtgttcttttgcagacgtatggagatggccgccgatcgtctgtacaaggagaagaagatccgcggtttctgccatctgtcggtcggacaggaagctgtcgctgtcggaattgagcacgccatcactcgcaaggacaagattattaccgcttaccgctgccacggtttcgccatgatgcgtggtggtaccgtcaagtccatcattggtgagcttctcggccgccgtgagggtatcgcgtacggcaagggtggttctatgcacatgttcgccgagaacttctacggtggtaacggtatcgtcggtgcccaggtgcccgtcggcgccggtctggccttcgctcagcagtacaatgaggagcccaacacctccatcgtcctctacggtgatggtgcctctaaccagggtcaggtcttcgaggccttcaacatggccaagctgtggaaccttcccgttctcttcggctgtgagagtaagtcgtttcttccaagtcttaatagcatcaaaaaagtccgcagatgtactgacgctatgttcttctagacaacaagtacggcatgggtacctccgccgcacgctcctccgctctgaccgagtactataagcgtggccagtacattcccggtctaaaggtcaacggcatggacgtcctagccaccaaggccgccgtccagtacagcaagaactacgccatcaccggcaacggacccctcgtcctagagtacgtcacctaccgttatggtggccactccatgtccgaccccggtaccacctaccgcagccgtgaggagattcagcgcatgcgcagcaccaacgatcctatcgctggccttaagcagaagatgctcgagtggggcgtcgtctccgaggaggagctcaagggtctcgacaagaccgcccgtgccaacgtcgacgccgaggtcgctgaagctgaggctatggccgtccccgataacactccccgcatcctgttcgaggacatctatgttcgtggctctgagcctaagtggatgcgtggtcgtactgtcgatgagactttctactactagattgttttgccctataggcacttctgtgcatcatggaagagctttttaattgttgtgtgaaggctcgggaagatattcttgcgtcgttctatcatttatctgtaatttagcccgatgactgtttcctcttatgtttgtttacttgtttcctgttctagagtagagagcaattgccatcggctgggtccttttcaagttcagtacatcaaattttagcaagtagtcttgcaatatcttcatcaggaattttaaacaagccttggttagcaatatcagccatcgaagatatataggcacgccgtccttcgcagtcgattatgggtatcacatcaaaaagaaataaaaaaagtaaaagtacaagcaagaatagaagggagacaacaagccatgtctagaaaaagtaccaaagcaaggctcaacctacatcaagcaggctcttgtctcaacatttcaagaatcaggtcctgagtccgctgcacagaatccaatttttcttccatcacaacacgttcgcgctccaactcacctcgaaactgagcctgcatctcctggcgtagctcttgcttcatttgctcaatctggatgtgactgagaccttgttcctgcggccgtgactgttggtgctggtgttggtggaatgcaggctgtacctgcgagtgctgtggttgccgggggaaagccagaaccgggggttctggggcagcttgtactaaagccgagatcatgggtgaggcggcactggcgtctatatcgcccccggatgcggcctctaggtgtttgttgagttttccaagtgtttcgatgacggctgagactatacggccgtcggattgtggaattgggggtgtggagggaagaggtgcagtgacttgtggggttgagaacatattctcaaaccccggtggtagtttcagtgagctgatcgcggagacaggtgtagagggcgattcgaggaaatgcgcggggggcgtaggaccagtaatcgagggcgagggtgtagggctggtagccgggagggcagtatcaccgacggtatccgcgacaggctgatgcatcatatccataattgaggtattgacatcagtcgggctagtaacagatgacccagacatgttccgccatgggtcctggtctccattttgagaattctgccgccagggctgcggctgtctacgtttcttgagctcatcgcgctttgcaatgcgtcgattctcggcttcttcccaccgctgccaggtcggaagccaagcatcgacagcagcgagccattgcgggttcatcaattcctcggccgttgagccggctgcgtttgagacccgctgtcgctggtcctcgaggaacttgatgcgctgccttgtgaccatttcgactttgcgccgcactgagtgccacgagtatgagcgcccctcatggacacgcttgaactcggcggcgatggatatccaccacttgcacagattactgcggctgccgaaggtccctgcattttggttgcagatctcgaacagcactatttcttctttggttgtgagacgtctatgctgccgtgaagtgtcaccatcgaactcatcgtcgccgttgtgattgcgcttcgtgcctctgttggtggttgatcctgacatcagccttgacccaactccttcgctggtttgagctacgcccaccggcatcggcgcatagtatagatcgctttcgacgatgcctccttcacgtgagtcacttttgattaggtttgcccctcgatgtgtcccttggctgctctgtgatgcgttatcggtcgtatgtggatgcctcactaccacggactgggaagctaggctgaaccctgagcgcaggtctgatggtactgtcccgaagtaattttgtgagggataatgatacgaaggatggcagtattcgtgtggttgaatgcgcgtcatgagcacagcagcttgcgcggtggccgagcagccgctgtgggagaccaacagtgcacgttgggtggtctattggcccaggggatagtctccctagttcaaaatagccatcaatagggtggcaatagtgtagcagaccaatgcagaaagtccttgtcgatctgtggggataaagataaagctgcgatggatttcacctgagggttttccacgaggcccgtgcgccgagcatagtatggcagctctggctccgtacagtcttgtatctgaggatgagcttcaatcgggtcatttgacaatttgatcgtgttttgattctgcctaattatatgtagctatttgaattctatagttctcataggatttgagtattcatgtgctgcacatttatactttcgcgatgtatatgttggagcttcaaccacctctaggtacctgccaacaagttctgtcatgtcctcacaacttcatgtgaggctctaatagtttttggggaaccagaacttagtacatcaagaataagctgctcgacatatctacctataacaggtaggcaaagcagccaggtctacgcaagggtcataaagtgactggctaatatgcagcatgaaacatcaacatcaataatatatccatttacgacacatcatggctatggtggtacagggggtggggttgacacaaaaagctccaaagacaggcaaaacaggaaccaacaccatggtcaacatgatccagaaatatgcagaaagggaggaagatctaagcgcccactaatacacagatgggaagtttagggggaaatagtagaacagtagagacaaacgaggaagggacaggctaggcagagaaagacaggccaatcgaatcctctaccaccgtctcctcaggtaccagccataagccggagtggcaatggtctcgccgaagggagtgggcacctcggcggaaccgggacgggccaccgggtggcgcaggtacacggctgcacaaatgttctgattgacctcgaggtagcgcgggatgaaggcaaaggcagacatgtattggcgtggttgccagggggtggagtaggtcttgctgttgtcgagaggattatcgcgcatttgagtaagagcgcgcttgagcgtctcgaactcttcgtcgctgagttccgaggcatcgacttcattacctagtgttgcctgcgagaaggcttcggagagtttgtcgcttactgcggtttctgtatctttcctggcggcagccaattccctatctcccttgtcggatgcgaaggcgtcttctggacggagtttcacgtccttattgtctggcttcttctcggcccgcttggccttgagaagcagggttaattgggaaaactgggcttccaagctgtctgcgaggacagtgctggactcggagcgggacaatacgcggcggacagcttgttggaagccacggagctcctgcttgcgttggggcgcgagtgtatccttgccggcagacatgatagacttggcctgtgccataagcgccttgagagtctccttaggatcctccttttcggtctccttggcctcttcctctgcggtctccttggcctcttcctctgcggtctccttggtctcttcctctgcggtctcctttgactccgcctcaacctcttcctctgaggtctgtgccttcgcctttctccgaaccaatcggccctgacgccgctcgtacgcagtcttcgtatgaccagtagcgtacattacgcgctctggctcaacctggaaaaggtcaccggggttgaggagatagctgggatgtttcatctagcacaaaagcgagtcagtaaataaggaatcggtagcttcccacgtcgcatcataccttttgcccgttaacagtgaccgctccgtggatgacgaactgtctcgcctgtctggcactactagcaaagagagctcggaagatggctacatccaaccgacgctctaggggcgcaaaggtcatctgggtgtaaggtgtaggacgtttctggtaagcgggcttgccgcccatatcgagtcctgagccgcgaccggatgaagcttgggaaccgtcatcggcggccaagtcggatgcattcatggggataacactgcggatgcgatggttgaacatgcgtttccactgtccctcgcggacctgctcgccatgataggcacgggaagcagccttagcagaccatttctgctggaagaatgtgcgattgatggtgggtgggctgcggaatcgttgcatgttatacaggttgtatttgctccatgattgacggattttctgaacagtgtcttgttagtcttctgacactgggggaattgagtacagtgtagatacatacgcctttcgacaaagtattggtagctctgttcctcattatggcgattcggtaaacacaatgctgtagaaaatgatatgctttctagtccgaattggccgagtctcaaaacttcagagcacgtgactgtatggtattaatgccttaaatttcaggaatcaactgctggttggattcgatgtttgcctggtttgcatattatgtaaggggatcctcttgatgattggtcaatcaaatatcgcttgatgccaccgccctgtatgaatctgccaccgccccagggaaaaggtatataaggatgcctcccccccgggctcttcctctttttttttttcttcttcatacttaccttgtttgggtgactgtgatcaataagacggttcaccacaggctggtccctgcattgcacatcgcggcggaacagtttgttcaatggcactcgtgtcattgacaggcgtattctttggcacctccattcgtggaatatcttcttttcatcaatccttgagccagtggcacgagattggagacgagtaatgtactagttgatgcgttgtagccacacttatttgtaactaagtgaggccatggtgtcctaagcctgtctaccacgcgtgaaatctttctcgtgaaatgttcaagtctgcccccatacccaatctccccttctctgtgccgaccccgtggggcattctggtccttcgatatcatctctctggcacattcccgccatgtcgtgtcgcacctgccatgcactatcttcttttcatcaatcctcgagccagtggcacgagattggagacgagtaatgtactagttgatgcgttgtagccacacttatttgtaactaagtgaggccatggtgtcctaagcctgtctaccacgcgtgaaatctttctcgtgaaatgttcaagtctgcccccatacccaatctccccttctctgtgccgaccccgtggggcattctggtccttcgatatcatctctctggcacattcccgccatgtcgtgtcgcacctgccatgcacatgatttctttatcacttctcccttcacagctgaaagataaaaagtccggtgaagcattgagaaagatgtctactactgttgcaacttgccgctcacgtttgtcttaaatccctcccactgaagatacgtataccattcctgatctcttgaatgatataaagtacgaaatgaaattgtttggtatatggtacagaaaatattcttaccccctagacaacacatcgcgccatgtccaatgcatacaaatcccagtcgtacaacgttaagcatcttccctatgatcactatatcactctctcctagtacttgggaaagcctccgctaatgagtccgcttcttgcggattagtccattcctccagtagctcatgtgccatatcaacggtttcatcatcgatgcctgcctccagcacggtaccatcacaaaaggccaagcgggttaacacaacaaggtgtttctgtttgctgccaggtacgcatgccagtttctcctgcatattgatcaaggggccgtgtagccgcatgacaccgaaaatcagccgcataaggccattgactagcgcgacacgtagatctgactctggcggagatgagtaaagtgcatccagctcatcatgcatcgaccggaataaacgagcgagtgcattcgggtgcaaggccaggatcgtactggcatgcctttgggattggcccatagggttgaatgccagtgactccagcagcagtaggacctcgaggcgcattgcacaaatgtcgcatgcagtgtatggctcgacaccttcgtccggtatggcgggctcgctcagcatatgcgtgaggcggtccactatccacttttgtacatccaattggtcctggtcagagttcctgatcggaccaaaagaatctgcacgaatacttgttgacaggatgttcatcaaaagcaaaatgtcacccagtggatgtgacgggtgcagcatcacgagaatgaacgagatccggatattttgccaaaatagctccattgcacttttgatgtgcagtactccacacgcgatttggtaaagtagacgcatggccccagtcgagtcgactaggggctgcagatctgattgtggtgtctgtcgagcaattcgtttatctcgtgatgccggggcgtacttgaagcgaggaactgcattgacttccacggtgtcctgcaagactccaactaaaggtgtaatcagttcggagagtggcacgtcatccgacatcagactatattttatgatagcttcgaaacggggaatcggctcgtagaacttctcgttgatggcgcgctgccacagtgaggcgatcgcttgcgtatattctaatacgtaactgctcgggtcagcatggcccatgatctccataatgaagctggacatgggttgatccggttccgagggaaacgcaagctttgacatggcttcgagatccgtttcttggttaggatgcatacggtgactcaaaagtcgcatcataaatcgctgattgcgacctgcctctgcagacttgcgcttcacttcatcgacatcggccgaaatatcagtcgcatcagtcatgacaagctccccaccagcagtattcagctgtagtggcacagggctatcctggcttgattgccgtttacgttttcctggaactgtcggcgtggctcgcttggaacgtgctgctgacttgctgggcgataccacggcgatttcatcatcgtcaaatccatcgcggagaggaagcacccgggactttcgaggagtcactggggcttccatctcgcgatgcttggatttgtagttccgaagctggtaggcttcatccacaaggtcttgctgaagaaatacattctctgtcgccaataccttgccttcggacatggctgcctcaacctcttgcttgtgtttcgccatttcgtcggccatggatttccgtagagccgctatttgccggtcgtagtcttgtgtcatcgctgcctgcttccttcgaatgatcgagatttcaccggatttcgtttccacttgcatcctcgcatcggctagctcctgtaacatttgttctctttcttgctccatctacaaggattgttagagtttatacaaagaatctttcatctaacccacctgcgccaggcgtgcattgatctccgcgggggcgttcccttgcgcatagtactcgtccacatccatggcatcgcccagctgctcgttgaccgcaaatccaggatctgtagcgagtacatgttgagcatgcggaatgacatgcgaattattgacattatcgtacacctcggcctccaattcccccatctccagtgtattgtagtcgtttgttaacccggtgtggaggcgaggcggcggtctaaacggtccagcattgttgtttaatggtactgcttgagtgcgtagcacggggttgttgtttatggggtttgggcggtactgtgaggctgacgcctgcgttgctttaaacgcattctgttccagttcatacaacttccccggtggcagggagtcgaactcgtcggagccgtagtcgtcgtcgtcgtcttccatgcccccgccatgaatggactaccagagggagttgacaggttccaacttcacggaaggcttttgatcattctcgagttcgagcggttccgagtgtggaagaggagagagcacggcagttcaaggcacctggacaacaaccctgcacatccaatttcaatttctagtcacgaacgtaatatctgaaggtcaaatgatgattgattcattaataaacccgaatagtacaccagatagaaaagatataaaagatataagcaaaaaaaaaaaaaaaaaaattgaacacggggctggagctgaagctgaccgctctcggcacttcacatgagctcatcaacttctaatccgatagtcctctctcgctctctgcacactccacttctattgcccagactctgtttctggccccccctttttgacatcatgtcgaaatctcgccgtaacgttaggtttcaacaccggtcgaatgatgagcgacgccccagcgtgtccgacgtcagcgatgcaccctcagagcccactagccccagcaaaactggcaacgggtccaacccatctacagtaactgaacaggttggttttcagtgggctgtgacctcaggatctaggtctgacatgatcttcacttctagaaacccccgcagtccgaatatgagaagaagaagcaaaccttcatcactcgaacgatatggacttttgtgatgatcgccggtttcttcgccgcgttgttctccggtcacatttatattattgttctaattactggcattcaaatcgtctccttcaaggaagtcattgctatcgccagtatcccaaataaggagaagaacttgcggttcaccaaatcgttgaattggtacttcctggcaactactatgtatttcctgtacggagaaagcgtgatctactactttaagcacattctacttgttgacaaggtgctgcttccattggcgaaccatcaccgcttcatcagcttcacactttacgtcatgggtaagtatctcgattgttccccttttactccactaacctcggttgataggattcgtgttctttgtcggatctctgcagaaaggccactaccgattccagttcacccagtttgcttggacccatatggctctctatctgattgttgtccaagctcactttgtcatgaacaacattttcgagggcatgatctggttcttcctccccgctgcgctggtcatcaccaacgatatcttcgcctatgtctgcggtattagctttggaaagacgcaacttattcagctctccccgaagaagacggttgagggattccttggcgcatgggcctgcaccgttgcctttggttatttcatgaccaacttgctgatccgctacaagtacttcatctgtcctgttaatgacctgggatcgaatattctgaccggtctggagtgtgttccgaacccggtcttcacatcgcaaccttattctcttgaaatctttggcctgaacaagaccttctgggtagcacccattcagttccacatcttggccttcgccactttcgcttcgctgatcgctccgttcggtggattctttgcttctggtctgaagcgcactttcaagatcaaggacttcggcgagtccattcctggtcacggtggtatcactgaccgcatggactgccagttcatcatgggcttcttctctttcatgtactatcacagcttcattgctgtttataaggccagcgtgggtgatattatcgagaccgccatcaacggtcttacggttgacgagcagctcgaggtcgtccgtggcttgggcaagtacttgtataatcagggtgccgtctcagaatcggtatgttcccttgaaccaattaccgtgatcgtcttactaacctctcctagattctggattgccttctcaccgagctcaagcgtcgatgaacttaaaaaattgtacggcattcagattgaaaacaccacacaaatttatgacactcatatttcactttcactctcaccattcgaggacgacttttcaaccccgcgcttcaccctgcaactctcctccgattgcttctgtgccgacgaccccctactcttgcttcttgcttcattcgggacttgatttaggtctaccgaatatgcatgccatccttaatgcgtgcatgcatgatatgtacatacatgcgccccgctcgccttatccgcctttcaacacggcattaacactcaacaaaatgacccgtgtcaagggccctaatgaacggtgtgaatagcgaaagtctcccacgccggaggcacggggacaactttttcattcttcatttacggctgtttccctgtacttttgttcagtactcttttttctattctattctattctattcccttcttttttttattgatgtcggggcctggaccgaacctaaatttgatgactggtgttgctcggtccatctggccaggagctttgctacactcgcgatgcgtggaacagacacatctctttacagaagtggtagaagaagggggggcatggtatgtgtgtgtgtgtgtgtgtgtgtttctggcaaatgtgcctctagtctcgctgtttttggacgcgtcaagacaacaggctgtagatctgtacatggctttcaattcagggtttgaagctgattcttaattttctttcactccatatttgctcctcgagaatgcgttcgtgggtacagcaaatatcgcccactgtgttgtcctagaatgcgaaaccgattatcggtagttgagggttcttttcattgtatctatcatatctcgtcgctggtcatagggtgtctgggtatcgagaaatcgtgggaaagaggatcatggtagaaaacttccagaatgtgaggctcgtgcccgagacaacttagttccgaaactgtagcgcaagaaacagggcgtttcgcctagtccagaaaagtggacaaacacctgatcagaactgagcaaggatgctagcgtatcccaacaagagtccggacgagcagccgatagcgagtcaccgtgaccgaagcattgttcggttgaaactaagatgggatatagtatatggggaccccatcccagctcattatcaagctatcaacccgctatcatattatcggttcacggaaccaagcaaggccttttctggctgtgcttcgctgcatgaggcacgccaggtgccaggaacacacacaaatagcaagaacatcttttacccgtcgacttcatattcttccatttcgaccttgaagtacgccgcgacctgtcgtctttcctcatctgcacatgcgggatcgagcatgaatcgaacggcagcatcacggcctcgctcgcctgttctctggcggtccccgttcgcagcaattggtgttaagggatgggcaggtcgcggagtatcttggccattggcgctagtgccgttgaatggtttgcgtggctggccgatccacgggtggtagcgcgggatattgtgttcgctggcttcttggttgagagggatgcggacttttagaaaccggtctgctgggaattccgagccgacggcggttagtgagcggtggtgggtgtagagttctaagaggtcgaagagggtctctggatggttgttaatgtggcatctaagtggattgaatgcgacaacaatacttacccatgatttctgctcggctggtgctccactgagcatagtctagccccgactccacttgttcgacgcgctgatctaatagtcgtcctgcaagctcaaggcaggcaaaggccatagtcgacgagttttgtttgatgggtgcaaatgtgcggtaaagatccgacgaaatgcggtaggcaagattggagacttcggagttctgtagcagtccataatgccgacctagcttcatgagggtcttgtgaggatgccgggttcgaaagtcaaaaccagaggcctctaacatgagtctttcgagaccgataatgccgcgcgcatgggcttcgaacatctggcgacaagcgttaattctctgtcttgtgtcgtctgggatcatgacttacaggatcatcagccgataagtgctccgagggcgccactttcaagttgtgctctgcgcagacaatgtctcgcgattttttgagcgtatcttcgatcttgcatgctgtgaacaaagccgcggccgcagcatcctatatcccgggttaggctgatctccttgaaggatttccaagtgaactcactgtgaaattatactcattgtctggatgcaccaatcgaaatcggtggtaatatccaactgctgtgtcaaaggtgcgaatgggactggatttccagtcagtcctgatgcattttgcttggcttggagtcaactcacaggttgagggctctccgtacgctgtcgatccacgctacgccctgaagacgcaatgaagtctcgcgaaggggattaacgctcatcgcttcgatacaattttcaattgtctgttcgaatatatatggattggccacctgtataaaagacgggtggatggccgggggtgacaggccagattccagtgttgagctcccgcgaggagactcttctctcgtatttgatgtcatggcggtttcttagacttcctagggatatggcaataccgagcaatgtctttggaagttgcaagatgaagacgcgcaacaagtgactggattgatatatggatcacgtgtccacctaagagctcgcaatcacgtgtaggtctatcgggaatatattattccgaagagtatatgtgtctctaccatgacgctttattttcccgaagacggatgtgcaattaaactaatgctggatatacctgaatagcagtatactgtctcacaaatccctcaagttcaaggaaccccccgaccagcccgtgtcgccttagccaactcactttgagctgtattatccgcatatctcttgtagatgggaaggtaatgcgcaagatcactggtagtctccttgatactccgtctgctctcaacagcagccagccaagtcctccatcggctccaaactccctcatccgcacccccttccccctccctcggaatccctaatccaccactcttaaactcatcaagcacccacagtcgtaccgcccacggagccaaaaccagatctggcagactaatatcttcaccaaggaagaacggtccctcactgtgcatctccttggtccaggctttcaggtgattcaaaaactcttgccgagcctgatccaaccccacatctgcgttctgcccagtgccatctgcaggctggtactgtaggaaacggtggaaagatgggattattcgagatgtcacatagtcaatccagatgcgtgcgcgggcacgctcgtaggcatcatctggcaagaagcggggttggtggtctgggtaagcttcttccaaatactccaagatcactgtggattcgtacagtggccgtgggtgtggatctgctggtgttgagagtgtaggaactaggcctcgcggatttagtgtgagtaatgagtctggcttgttgtatgggttgacctcgatatattcgtatggaatctttttctcctcgagggcaagccagactcgttgcactttattttgttaatattgttacttatggacgagtggctagagacataccaaatctgtatacctggtaagcagttggttggttaaagtatagaggggtcgtagacatacggacagaaccaccccgcatataactttaatggctgttcagcgcgatgcttatcgaccagcgccttggccgggccactggcctcgggatataggttggagtcaggatgagctgacattgtagagtgcaagtgggtgttttcaaggcaaggtggaaggtgaaaaagaatctaagttggacaatagtgtgacatcatatcttaagcatattcgtgattggacattatctctagcgggatattgaaattcaaaaggatagccttgcttaaatcatcagactctagtcttttccatacttcccgatcaacttctgcataatcaatatagcaccagatcgatagcctccaccaaaaatagcatgatgattcagatgatgataccttttggctatatcagtatacttctccaacagcaggatacgaaatactcacaattcatacaattccacccgatcagcatactccgccacaggctcagtcttcggtacaatctgatgatactgatcaaagaaccgagccccaaacccaccaaacatctgcataattccaagctcaaactcgctatgcccatagcaagctgacgggtcgtataccacatccccaggcggctcatcgtgacccgagccaataatccgaccccaatcagcattcccactccacaaatccccatgaacaacaacaggcacaatccccttcccctcaccggcggaagtataccccaaatgaccatccccaagcagccgaggcacaaccacatgcgcggtcttctcaaccgcctcgcgcagcccagcatcgggcccattgcgctcttcagatgtagctaggatcgtaagcagccgttcattcgcgtagaactcaggccagctgtcacaaaaccggttcggctgcttggtatcaccgcagaaggttggtacggggaatccgaatctgtgccggccggtgtccgggtccacaggtgcgggcgtggtatgcagtctgccgaggcggtgcgcgagcgtgacttcgtcatccgtgctgcggcccatcttgccgccgagctggaggaactctgttgcgaggaagtgcgttttggcctttgcacctggctcgtcgagtggaccccgagctagggcttgcggacagaaccctggcactgaggctgctattgcattgagagactcggattcgccttggaacatttcctctgcggctttgccttttgaggaggtttttacaaagtagcgtcgctcttctgtgccatttttggcgggaatctgggcgtggatggtgcctgtgcttgtgaagcctgaacctaatccggatgtggagaggctgacttttgattcggatgggagtgagagggcttgaagaatgggttctggtacgggggacattgctattagatttctggtgttaggaagaatagattttttttttaactagatgcaggatgcagagatgcagagacgcagagacgtagagacgtgaatagaccggattgcaaagggctatgacgtttttactccacatcgagcttttgtcaccatatgaaatgcttacagttcccatgtacatattcaccaagttgtataaatcctatatttagctatgagacgagatgagctcgtcacggtaagcaaaaaaaaaaattatgtccagattttcctacagtagtcctgatccatccagcaacgggtaactctaaccataacaaagatatcagctatgcaggagacagtttgttcagcaaatgcagcgcagtctttgtacgttccctcgtgtctagctccgtgtcatcctcgaggctagccagccgttccgcaaagccaagagaccgaagtctcactgcccgctcccgacaaccttcatgatcgctctgatcctcttcgtagatgaggttgatcactacccagacacagttcgatcgaatgtctttgttataatggttgaaataattgcctagagaccgcagcaagtcacggtggaacgcaacgatgcgccggtggcgtgggtgcccggccgccaagtggatgatgagagcggcggctgcgttgatgatctcattgggaatgtggagggactgactgctggagtctcggcggtgaggcagttggatggtacgcggtcgcagtgtatctgcgatggcatcaagcaaatcattttgaccgagttctttgaatagatattcaatcatctcaggtgcatctcgaccacagatcatgttgcgcagtaagtcgaatgcctgctcctggacggcaatatcgtcctgtcgagactgtgtggtttgagccagagttccgtgcagaacgagtttgcgcctacgtcttgcatcaggaaggaacatgtccaaactcattttggaaggaggcatggtatccgtcatcttgagatcctcgtcccactccactgcatcatccatggggttcagaatatcgacctgttcgccagccgagttggatcgacccatggcaaacccaggactttgatctgtttcctcttctatctcccgtcgagccactgcgcggacgggatcctgagagatgatctccataatccattccgggcccaaagtctcgatgatcttcattctgatgtcgtttgcggtgtcataaaccatgtgcttgagagcccagagcgattcgatctgtaatttggtgttggatgaatgagcgtgttcgcaaaggatgggaattatgttgtgggaaataatcgcctgagaagattatgttagctgcaaagtttgtgaacaaaatatagacatcgaccaacctctttcatgggactgaagtccaaggccaagttacagattgcagctgttgctgcaatttgtacctcgaggtcagaatggcgaagaagggcaaacagtggcttagccacgccggcatcaataagactagtcctaagcacgctcacggatctggtcagcatccgagctgtaccacaagcagcaagaatggtcggaatcgggtttccgtcctctgcagtatttctgggcattggagcatcagctggtgcatcactaggccttggcttgagggcgtcaatgatgtaagggactacgccatgttcgcaaatcgccttgcggtactcatccttaaatgggactagtgctgccaaagctttgagaatgttctctcggtaacgcattacatggcaaagggtcggagagtaaccggaaggtccgagccggcactcttgtggaagagactcaatgtcccgggttgggctactctctgcgtgccacatcggccgggatgtctccgtgattgggttgtaagtctccttgagaagttgggaaagtcgcttaagcgcattgccttctactgcgtgtctctgcaactcctggtcgtccatgaccaagttggctaataccgcaggcgcctcttcctttaagcgcaaggtcgacgagagcagcccatcatgaacagcgccttcttcatctggcagtcggacgttcttgtcaagcatacgaatcaagatgggaatcaacaaataactgaacattggaatgcgatgtttcttcgccaatcctaaccggaagagggccgtaacaagacgggcggacatcaaccgtgtcatgccattctctgatcggagaatgcagagcagccatggcacaatcgaattctcctcttcttctgggactggtgtctcagcaagtgaaaaaggcatggggtaggaatggctgtgtcggcgctgtgagcccccgtgtcccagaggtgggaaattggcagaactagatgattttgtgtgtgttagaggaaccgacggcaaaagctgttctatggggttggagccaagatgacggggtactgcggagcccgataaatatgtggatccccagggagctttcttgatatctgatggagcgaacccagcaacttgttttggaaacaccgtcacaattccaggcgatgacaggaagtgctctgccctccatttcgactgttcaatgatgacagcaactgcgcgcaggatcggtgctagctgggcggattcgggggccggaagtggcagatcctccaatgcaccaggatcttgaaggcgatcctccgcgccaggcagaacatatccttgggccacaacaaaggaggcaatcttgagtgccaaagcatccaacaccccggattctgctagtgccgtcttatgggtttcctctgtgcatagcttgccgattagagccgctgctaactcgatcgtggcctgagtacgcaggttcttgtactcctgcgagattatacgtctaagagaggtaatatttgcagaagcaaaaacaagatccgcaagctgtgtgtcccgaggccattgttcctggctttgcaacggtatccggtctgcaattgtgttcagaagccgtaaaattggaagacagaatgaatctgggcaatccgacgaggaaaatattgaaagcaaggtctggaggatattgctcgcgaatagtggggtgagaaacgtcggaccacctactcagtaaagtcagtgtctgtcttggcaataaggatctctagtcatcacgtaccttgtgccaaactcccaacaattaaagttgcttgaaggcatgcttcgtaatcttcgggggcttttggtgtggaccggccttggtgcaatatcgattcattaaactcggccgttcccggccatctcgaggtcagtacctgtgccaaagctggtatgattccctcgaaaatgtaggcttccttgcgctggtcatggccaatcaattcgttcttcagagtgcgcaaaactgtaatctgagaggaggccgattcggcactctgtagctgcagcagaatcggcggtgcggcagctcgcgtcatcttctagcgatcaccccctcccaacgggaggttctcggcgtttcactttgttggatcaaggaattagtagagaaattaaaatgaaattgaggaaatgatctccgttgatgtgaagcttgtgtagacctggatgtacaacatagatatgatggcagaccggaactgtagagccgggcctagagatactccgcactttggttctgcctacacacaccgttccagaaaagtggtcccggactaatgaaggagcgacaaccttactggtctgaggctataaatgtttgtataacgacactttgctacggaaactgaacattctgactgcttctatattaagatattctgtcaagaaatgtcattgccgagtatgatggggatagctagaatctaaccacacattggcatgatttccatgattgtttgcctttccatggaatctaagggtatgtattaggagtgtatgaatcttaatccatatttgcctgggtattgagatctataactagttagttatgtgtttggtagcctatattgtaaggccttgaccgttggtatcagtccccatctacatacagcactgcagccaatccgatatactgctggtttgaatctggggaatcagatattggcacgatgtaaatacaaccattagctgccatatacctatataggatctatatctatatatcttgatatctatgtagaactgcaagatatcacaatgtattctactaattgtcttggcactctaacccaatccagctagagtacggcagtttcaccccgcttcccggggctcggtagtagattcagttgattcccgtctgctccgtctgatccgtcacatccctgtacaatagatagaccgctacacaacatctagggctattaatttgatcaaaaagactgcgatccttcgctcgccaagatcagctctctacgcacctctatatacatacatggacatctagacagaatacaagaaaatagaaaaatacacatactgtaacggtacagtcaccggaagcatccagccactgacagcatggatctcattacctcacgaactttgaaaagaacaagattttcaaccggcttttgcccccttcctgttctcttgtccaaggccattcggagtgttcttcccagatcattccccctctttcctttggcgacatttggtttcataccatcgcaatcccttccgctttccctagccttttaagcctctgaggatgagggccggccgtgcacccacgccatccacagcgcgccctgacagtgcgcccacgtggtctcacctcgcactgtgaatgctcggattcccttcattccttaataacctagtcacaccctaaaaaactatgttggcgtcttcgccctcgccttcgacggctgcgttacgctccccgcttccttcaacttcggggtcgcattctcattcccactatgagccgactggcgctccacaattcaatagtcctagatcctcgcgtctggccatcgacgaacttcgctcagccttgaatcggcatactgtcgatccttcatctcctgaagtttcaggagatcttcaacgcaggcgcgcatcgacatccgacactctgaagaccctggtcaatcattcggccttggcttcgacaccccaatctacttcttccgccgtgactgcaaccaccccggcgactgccccatctacaaacccacccccagattcttcctcccccgctccctcgatgcccgccccaaccccgggctccaacaagcgcaatagccaacgcgaccatcactcatcggatgcgacgccggcggaatacgatggcgaagacttggaaagatcgcagtccaagcgcctgcgaccttccaaaccagaggtcaagatgttgcccacgcaatatgaactggccgaccctcgtgacatggtcgtgctgatctctagcatgctgatggagctgatccgtttcaacgacaagatcccactacaccagggtcgtctgactcgctttcactcccgctctccgccccgaatctccgtgcaagattacctccagcgattgacaacccacgctactctctcacctcccatcctcctcagcatggtctactacatcgatcgactctgcgcgctgtaccccgccttcaccgtgtcgagtctcaccatccatcggttcctgatcaccagcgccaccgtcgccagcaagggactcagcgacagtttttggaccaacaaaacgtatgctcgagttggtggaatcggtatgacggaattagccatgcttgaactagatttcttgttccgagtcgaatggcgcattgttccacaaccggaagtgctggtggactattaccagagtctcgtcgatcgatgcgaagggtttgaaattgaaggcgtttgccagaatggcagtgctaaagctggggtaacgggaattgccccagcagccggtcctgtttcaacataaagctggattgcgcccaaatacgccgatgcaaaatctgcacaaattacgttctgccctggaccactcgggctggtctcgagtcagccatggatgagtgggttcttccgcctgtcacccgccgagccactggcggtgtgaattaatacataccacttgcattagggggggtgatggtgtctgatctcgatgcaccattgcttttgatttaatatcgaggagcacaggcatcagacacggcgctttagaacagggatctatctcagcatataccaaaaggtcaatgggttgtaccttgttcctacttttcagcgattttttattttacggggcattcggcgtttgatgtctcacgggatgatgaggtgatatctatggccttttgtcttaaacgggtatttttttagaaccatacaaatctcaaatatcgactcataatctgagcattttaaattgtagggttggaaacgagatacatatggagcaactatcattatggagattcccatatacttctatgtctagcttctcgtaaatgtatttgatcgatgttcatttggagagtaaaccatataaaagaccaaagcgaactagcgtgagatcatgtttgcactgtttgcttactaactttgtatagctttcttcttttttccaagtcctcatgtgaatacttcctctttggctgaattattcaagtcgatgtcggcgattgaggcttaatgcaagcccaaggcactttcagttacaatcgcttttaccctatgacattggttgtacattgtcaacctatcctgcaacattctatctcaccccgcgcctggctgggtgccgtttgagatagctagaatggacgttgaaaggacaatcagaggcctcaagccccttgacgggcaagtggtccctattcgaacagtccaagagacaaggccccaagaagaattcggtatgacctacaatatcgccctcttcttgcgacatcatgattaaccaacaagtaggcgatgcctttgtcgcagaagtcaatgtgaagtctgcatccaaagtgatcaagtaagctatggactcccaagtttcccggtttaaactccatattaatcctcaattagggctatcgacgcggctttccccaaagacccttcccttccgctatcccacctccgtcgtttcgcgaaaaaagaattactcccgccgccgctgaaggcagccattgaaagccagagagttcctctaacggccccgacacaaactatcttcgtcctcatatcaccaccactgcctgatctcaccacactcaaggctctgctcgctccatttgcgccgcacacggcgccggccgctacaaacgatcctccgactacgaatgaaacgccagacgaagcttcacaatccgatataccaacccctactattcaactttaccctatcaaaattcctctttgcccccccttcaacacaactcaagccgaaacatggaccaagaccctctggccagtcatattcaacccagccgcaccgcgctcaactgtcgcgccgcctcttcaaaccctaaaacgtgtacaagaatctattgaaccacgggcagggtaccacctatccctagcgcgcaaagtagcagaggaagcagaacaatccgggctaggccgcggcgtaggcgcggtgatagtcgaccctgccatcgacgaagaactaaccgcggcaggctatgaggccggacatgacaccacgtcacaatgggacgaagcagtcctcgcggttgccggtgatgcacggtactcccgctccgaagcgcttgcaccatcacaggcccagctgcacgccggggtagcgccaaacccagcgagcaagatatatgacgcggatgtcgagggcgggcctgaactgcacgcgctgatgcgtgctgtcgatctgattgctcgctggcggcgagaacacgatcggtttgacgacgtgtcttcatcaacgactactacacatccatcgaagccagaaatagaagcgccagaactgagcgccttcgaatcatactttttataccgtcaccgtcctacatccaccgacatctcaaactcacctcggtctccgtcctccacattaaagagaaagcacgaagtccctaaccctgaatctgacttgagtatccacccctctacagacccttcccaatcccacgtctatcaaccacctctccctgctcctcccccatctaccgtggtatttgcggattctgctgctccgactacaacgccagcagccccgcgcatccgcactcgctcgcagggtggctatctctgcacagacttggacgtctacctttctcatgagccgtgtctgtgctgctctatgggcttgcttctgtcccggttcagatctgtcatcttccccagacgtgggaggttagcgagtggtggcctgtcttctgagccggttggtcctgtggccgatgagcttgatcaagccgcagaggctgatacctctacggttgataaggagggcgaaagaggttactacgggctgcattggaggaaggagttgaactggagggctcttgggtttgagtttgtggaggatggggatgtggaaatcatgggcgaggctgcaatgcctgtcttccatgcttgattgcaaatcatccggtataacctacatgttacataaataaaccaaacaacgtgttacaattttgaatacacttgagataaacttcctttgaaattttttttttcagtaaaaacaggctttttgacataccacacctggtattctgcgttctcgcgcaattcaggctgccgacctgtaacctccactctcttccaaacctccaacccattgtggtctgcaccattaacctccctcctcttccctactaacacgagcaagaaacgccccgacacccgaggctgaacatcaccaaccctcttcaacacccttctatgcagacaaagtaatcaagatcaagacaaggaaattcgggacttcgtcacaggatctcctgtatccacgccagatgtcaaatgacatggcaaagtacataaagaatttgataggaacagctcatggaaacccattcatctcggcctggtcatgtgcgagaaggccaagatggatttgaataaggtatccataagaaaacggagaggggtataaaccgaggtcaatatccctaagatacagcccaaaggtagactggaaaaaaattggctcaaagacaatgagttatggagtagcaaatgattcggattcgccacactgaaagaaaaggtcaaaaagaaaaggtaaaaacggagcccgggtaaatgcttttgtgaagcaaaagtgagatatgatgaagaagcctttgggtagagatgtggatgtcaaaggaccgccgtgccctatattgtgttcctctctccagatggctctattgtgaacggtgtttcatgtgcagagacgagctgtaaacacaaaaatggaacgagctcgccgatagatggatgttatgtatgacctgtcaatacaggcggcagataatcctctggagtgaggatcaatatgcatgactttgtggaagacacaaaactcgatgtgtcataggatgtagtgggtatgatgctttttcaacgcgtcgttcaagaagtgatgcccagcctaatggcgaagcttttggcgacaaacctcaatccatccgctggtagaacaatagataggccactttgtcgtcccgagggccatagcggcccaggggagttcggaccccagagggagcggcaggaggtggagtgactccgttcacggattttttgcttgcatgtccgttggcaccattgccattgacctggctccagcccttgtcgctatcagttaaatccatgtcatcctgatcaatgtggtcgaaaatattgccgttagggatcttgccatgcctgtgctgctcaagggcggcagcaagaaccttagggtcttcctcgccaccagcttccgccacttcctcgctgcgaacgcgacggatggcagtgtcgtccatgcggatccattccaagccttcctggcgccgaacatcgactgtgtagtgaccaccgctggcgttcttcccgtgatggtaaatcacacccataaggcgatactttgggggacctccctgggatgccatggcgttgcgccggtgagctgggaaaacctctcgcggaagctccaggtctaggggatacccaaccttcttccaaatcttctgggtggcacctgtgacactgtcgtactggaagcgcttgagatgaagaatgaggacaggaggcaaagtctcaatgaaaatttgtttggtcgcggttatgttgggtccgcgcgacgaattgaaatcaccctggatgctttccggctttgtcattcccttgagagcgtcgagaatgttgtgaacgtcatgagacccaatatcgagttgcaaaggttgatagggttctaatgtgacagaagtcttgttaccaggcaccttgaattctgaccgaagctttcctccgaagattctggtaaccggcgactcagcggcaagtgagccagacagttgggtgaccgctgctttttgcttgtggccaacttctaaccagccgtcgataggagaatcaccgccttctttcgctgcagtgtgcgtttcggcacgagcgcactcctcgtgcatctcctcgagaaggaagcctaggaactcttgggcatcctgctgatgtccgcgccgcatgtccctgaatcgtggcagctgtcgaaccatctcataaacaaattcaggaacgaaagagtcgccatattgctcaagctcattgggcttcaatctgagacgaagttggtcttcggaagtggccgcgtcaataacacggaattctttcatgaacataatcatcgcatcgatcaaaggaagatcgctgtggaaagtgtgcgcagcacgtcggccaagatgatcaaggaactgatagaacggggtacagaaaacaagaatttgcaacacagaattcatgtagcacatgtttccagtgtttaccagtcctcgaggttcaaggaacgcaatcttgtcgctgtattgagtgacatcttctcccaatttgctcaggacgtctgcgagtgatttgtttttctggataggcaatccgtgtggctcagccaaagcggccgcagccgcggcgcttgctgctttcgccgactccttcgaacggaccaaatcagcccaagacttgggtgcagctagcacaggcgagcttgtcttgttttctgtagaagaagctttatctgattctactactggggcaggagtaacaggtgcagtcgatttaggggttccagatgcgacgctgccatctttggcttggcgacggggggtagatggtacattgggcaccactggaataaccggagcaggctttggaattttcgactgtgcttgcgaccttgcaactgacgaaggggtagtgggctgtgtggagtctgcatccgactgttggaatgtcgtggttgttggggtttgaggttccgaaaattctcgcgtggaagaacaagatggctgagtctcttcgttttcatcgccttcgatgactatgtgcgtatctttggtgggaagctcaactgatgattgcataacacggcccttgcgacgtctccgcggggttctagccgggaagggctgctccggaacagagagccaaggaatctagactacctgttagaaaagtattataattcgagatgagagtaaacgcttactggtggggcaaaagtgggcttcggcggcaggtttgactgtggctcccatcgtggtggcggagaagcgataggatacccctgggccgagtggggtagaacagcaggatattcctgcaattcgggctgaatgggctgaatcgatggatgcaggacagacggagacattatcggttgcagtggagtcggagttctttgatgcatgggcatcgaatgaggaatatgcgtgggcgccatgacaggctgcgagtgaggatatgaggatacaatcatcggtccatagggcgcctggtatggacgtggaggcccctggatatgtccatatggtggataccagtaagggtattgctgcgatgggtatggttgatgaggcatatggccattcatgtgaggagggtatcccatgtactgtggtgatctcatatggggaggcgcggtattgtaagaaaagtcttgctggcgccttgaaggaggcataggcagctgcccatgcggcatggcagggaggtggtggttcatcttgagctagctagagaaaaaagttgtcttgacgttcggtcacgcgttgcctcagatgagtgccatgcgcgatagcagtcaagaggaagaaaaaatctggagatgctgtcgcatttaggcagccatcgtggcctcggtaagaggtgttggatatgttggatagttggagtgaaggatgaactgcgtcgaaagagctgttggtgttgctgggattggtggaaggagactggcaaaccagatcggagtcaggaaacaagagaaagagatcgctgtacaagtaactccctaggcggagagagtcaacaagtgggtatgagaagcgagtgagcagaaggagagaaaaaaggaaataagagacaagggttaggaggcctcgattcaccgtcaaacgaaatgaagctgaaggagaccgagaccgaattgggtgtcgggactacggcagcctctaacccccagtgcgccatatcagattctgccagcagtatgcttcgtaatataagtattttatacgtttcaatatatcaatatcacaaaggcctctatataaggtaggaattgaagtctaattcttaatgtttgaattttcctctactctctacattttatccgtatatctaggtgctaggcttatcatgaatgtctaaagtagaaattgtgtgaaaatcaagaactaactaccccatacggagttcgtaatcagtaagtaatgagatctggcggtgaattaggcggtcaaaatttaatataggaaaatcgccgggacttgttggttcacgtgacattacgatttgtaaccggagaggggcgaaaccgtaccttcacgacatcaactggcaccctgagggccgtccctcgatcctcactactattcttacatggcctctagggtccttcattctacttcacctcttctggtccaatctgaggcatctggttgatcactcgatctactacccgctagctgattgacatcttatcagttattggctttatccagagtctcccatataacccctcatcttctattcagccaactggctcgcttcgtctttctgccttgtttagtctattgcgctctcactgttgcaggataaataccgcataccgcagagatatgtcatccaatgcaggacagaacctgccctcttccaaagcggtaaacattccgaatacagcctcgtctactccatttcactcaacagctccagcggacaacagctctcaaaagcgcgtaggaggccctggaagttctcgaccagggatgtcatcgaaagcttcagctaccccaaggaataatcaagctcggaagagtcaacataaccgtcaaagaaaacctcggctattggatgatgacgagtataacgaatcggtgggttcacaggtctatctcctcaagagctgcctgctgaccccggagcccctatctaggccgccatgaaatccaccaccagccggaagggacagacgtccatcactcacttgatgaacttttcacttccacctcgcccacaataccaagcacctcctcgcaacatccgacggtatacatcatggggagcgggcgcaatagacaaatcgcgttatgttcatgcgaattatcgctttattgtgatgccaaatcaaaatttccatgctcaggcagccaatgccgatgtccatctcgattggacctcggtcctccaagtgctggtatctgctcaaacacaggctgccagttgtccgatctgtctttctactccagttgcaccgcgtatggcacggtgtggtcacatattctgcctcccatgccttatccgttacatgcactcatccgacgacgataatacggtccctgaaaaacggcaccgttggaagaaatgtcctatatgttgggactctgtgtatatctccgagactcgacctgtcaggtggttccgtggccaagaaggcgatcttcccgtcgaaggcggtgatgttgtattgagactcgtaaagcgtgagtcgggcagcacccttgctctgcctcgtgatgggtccgagacacttggtccaggtgatgacgttccatggtatcacgtggcggaagttgccgactatgctcgaatcatgaaaggcggcgaagactatatgaccgctcaatatgatactgagatcgaagatctccgcagacaggaagtcgaagacgagcttctctttggtgatgagaatacttggacacgaaaagcaattggttctatcatggatgccaaagagaaactgaaaggcattggcaatccgcctgaggttcggccagccaaggaacgcaatgttgcacctacgccagctagtcgctcttctgcacactctgttgtggcgccagcaacatcagatgaatcggaccatctttctcgaaccctagacgacgtccatcttgatcctgaatccagtgccaaagctaaagagaaaggccgcagcaagcaaacgtcagtgtcttccgggccagatcaaccatatcatttttatcaggcattgcctcagttctatctgtcgtccttggatattcgtatcctcaaggctgcattcggagaatattctatgttccctgcaaccatcctaccgcgagtggagcacatatcaacaggccacattgtggatgatgagcttcgcaagcgagtgaagtacctcgggcatcttccacaggggtgtgaagtcagcttcctggagtgcgattggagagacgtggttgttcccgaggttttggggcgtttccgcgcagagactgatagacgtcgaaagcgtaaccgggaaaaagaagcccgggaagaaaaggatcgtattcgcgcggagaaagaggaggacgacaaacggtgggctgccgctcggcgcaagcggccaagcattggaagtgccagcctcagtgaagccccattctctgctcatgacttccaaccacttcctcgcaacgtggatcctacattatttgatgctacggcctcctcggcctctcctccgcgctcatcgtctggattcggggcattggcttctccttccaccagtcccccaggcatccgcactgtttggggcacaacggcagtgggttcactgtcgccaagccttgaagctcaacgagctgtacacagtgacgggtggcggcagggctgggaggacgagctcttcgcccagcaggaatctgatctgctcgcccagacggcatctggagaccaaagtcaaaatcccggaccatcgtccagtgggggtaagaaaaagaagaaaaacaaaactaagatcactttgatggccactagtagccagagaggggcataaatcttgatgaagccttgcgtgtttcacttttctcaattgctattgagctcgtactgcattatcatagttatgtatatgatccatttccccgaatcttcgggttgtcttaatatgtggttctcggctgtgtccgtatgctatgctactgaaataccatctccaggatactccttgagtacttctaaagccttggtataatccatgctactgaaataaacacaattatatttacatttcatatacaaggaacattatgtatatctgtgatgtcttctccgaagcagagggaaaataactgttggaaggttgaagtcagaagaaataaatgaattattcaggcaatattaaataactagtcaactccgtacgacatagctcaaatacaataaggggtaaattgcatagatctagggcttcaaaataggcagttgacaacgagctccccccactcaaccaccaattctccctaaatggtaaattgccttttgtggggggaaatactgcagtaccctacatagcactagcgactggagaaaagggtattctgccccttttagtatctatggagggaaatctacaacctgactgctatctgattttgaacggatatactccgtagatgtaccatatatactactaataccgttcacgctctactactacgcctatcacaggacataaaatacccccttatagacttatataccagatcaatacttgggtatcttgcagattttaaaattgtttcttatgtaatcattcagaaccggggcccgcaaagtaaacagtcagggcattccagttttttttcaccctcgctcctttttaccctcagccattcctctccttgccctcaattgcagtcaattgcagtcggaaccttggtcttccgattaagcgaccatgactttaacccgctcgcaaacggggaagacccctaagtgagtagttcccaccggaatctagttgcgacgtatccacaccctgaatcagggtatatcttgccaatacccggaacaactggcctgttcatagtaggctttttgtcaagctaatttggaaccctttcttcctccagaaaaatggatcgtcccggcttcgttgagacccccggcggccgtcgtgccacccgcaacagttctgtcttgggaagtagcgagaatgaggcctccctctccccttccccctctctctcgagatccaaatccgcctcccgccgtcgtgctgcagtcaaaatcaagaccgaggaggatgatacgccggtgaaggtcacgcccaatggcaagactaccgacaccaagcccgagtccccatctcgcgtgatagacggttgggaggaaggcctcgatcccaaggtcgattatagcggacactttgaattcggtggctccttgggtgtgctgtccatgatgatcggattccccatgctcatgtactacatgtggattggtgccacctactacaacggcaaattccctcgccccgcggagaacgagagttatggcgactttttcgcacacttggtcgatctcatctacaccggtgctttcccatcggtaaaggcatggactatctactgggttttcttcatcttcgagggtgcttgttacgtgctgcttcccggtgtaagtgtctccggtcgacccctgccacacatgggtggcaagcagctgccatattactgctctggtgtgtggtctttctacaccagcattgcattggcactcattgcgcacgtgactggggttttcaagctgtataccatcattgatgagttcggtcccttgctcaccgttgccatcctctctggatatattgtctcattcattgcctacttctcggctttggcgcgtggcgcagagcaccgtatgactggctacccgatctatgacttcttcatgggtgcggagcttaacccccgcatgttcaagatcctcgacttcaagatgttcttcgaggtccgtctcccgtggtacatccttctcggcctgtctatgggtgccgcggcccgccaatgggaaatgtatggttatgtgtctggcgaggttatgttccttgtcatggcccactacctttacgccaatgcctgctccaagggtgaggagtgcattgtttccacctggtaagagtatctcctgccccagaatcaagattatttcctaatatttcatagggatatgtactacgagaagtggggcttcatgctgatcttctggaacttggccggtgtgcctctgagctactgccactgcaccatttacctcgccaatcacgaccctgctgaataccgctggaaccgctacttccttgccttcctctttgtcgcgtatctgtttgtctactgggtgtgggataccaccaacagccagaagaaccgtttccgccagcaggagcgtggtactatagtcacccgcaacaccttccctcagcttccttggcagacagtggagaaccccaagactcttactgcggctgatggctccaagattcttatagatgggtggtgtaagttcaagacaaataacaaaaatctacaagctccaatactaacaaccgtatagatggaaaggcccgcaagatccactacacgtgcgatctttacttcgccctgaactggggcttgattaccggattctcaagcccattcccttggttctaccctgttttcttcgcttgcatgatcagccaccgtgctcttcgtgatatccagcggtgtcgtaccaagtacggcgagacttggcttgaatacgaacgtcaggtgccttacctgttcattcctgtgagtaacttgaccttgaggactctcccagcacctatgtctaaccttgtgtactctagtatctcttctaatcgcagcccgctgctttccctcggagtcattgagacctcggtagttgagaccccaggggattcttcttttacttctttaggtccgattagaccatcattctgccaaacaaccttggtgtaacatgtataaacaaaacgtcaaatagattattaatatgtaccgatcatgaagcaagatgttccggccatcctatgatggcctcttgagttattttgaacccaccctgtgacttttttatgactttttgtacgacaagtcatcggattccgaagttgatccagatttgaagacagtatattctattcaatttaatgtacggagtacaattggtgcattcaagcaaaaccaaagaccaaagacgtctacttcgttgagatgttggccagtatcagcacatgactgccccgcgtgttatcgataatgatttcaccgtcaatcgtctgtatttctacggtcgtttcaattggtttctcaattctattccaatatatttctatctttgaaagaaactaaggcaacatgctgatccaagaatcctatcatgacgtccccaccaaagcggatggacaggggacaatgcgtatgtacactatggtcgctctcgtacagcacatttcttcccgctataacgccattgctccttcatgatgtcaattctaacaatttccaaggcatctatgtcttccatccaacaatcccaggctaccccaaagcccgcttccctggagtcgtagtcttcagcgagatctatcaaggttcgtgtgctcttctattattgtgaccatgtcggaacacctcaactaaagacccgacccacagtaacgggccctgtggcacgctttgcacgccaaatcgcaggccagggctacatttgtgttgctccttcgagctatcatgaattcactggtccggaacctctgaagtatgacgcggaggacacggacaaggggaatgcatggaaggttggcaaggtaagcgaaataagacagcttccatggataaattcattacttgtgttttctattcttgttctttattgggctatacttgtgattaatctcaagcgctgagtcgctgactgtctatcagaaacttgccgcttacgacgaagacgctagtctttgtgtggattatctgctctcgctgcctacttgcactggaagagttggtgccacgggcatgtgtctgggtggccatttggcctatcgttgcgcgctagatagccgggtcaaggcgagcgtgtgttacttcgccacggatatccacagcaaaacccttgcccgaggcaagaatgatgatagtttggagagagctggggatatcaagggtgagatgctaatggtatgtatatatttccgttgtgtttcgtatgtgtcgatcgctaaaatctccagatcttcggcaaaaacgataaccacgtcccgcccgagggacgcgatctcattcgcaagaccctccatgataagggcgtcttgttcggtttctatgaagtcgcttgggcacaacgtgagttgaacacatcgctcaccctcgagcatcaatatgctgacaagaatacttatccagatgcctttatccgtgatgagctcagcaagggtcggtatgatccagctattaccaaggtctgctttgagatgctgcttgagctgttcgggcgcaccttgaagctggatctgggcgatcatgatgggcaaaaattggtgatcgaggatgtatgttagaggagcattcgagtacctgtcaaacttctcaaacgaaggtgctgattcgctgaaatcggacgctatcaattaatttccaacggggctagatcgaggtcttatagtaagtacatatgaatactccgtagaggtacagggtaacgatacggcactgcaggcgccaaacaggatgcatatatatcctgaacgttggatcatatgttgtatgtgtgtacgttcactaaattgtgggttgagtccacctggtcgacctggcgaccatattattgtcctccggcaagggtggtcaccacttatccctaaaaaaagaagagaacaaaaaaaaagaaaacaatatcagcactgggtctagggagatctgtacgtatccagaagagtagaggaacaaggactgtttctaccatatacctccgggcgagagtactattattagcgactggacccaaggaagcaccatttcccacgcttcaatttccaaagttcaattgttttgatccgattggaatcgcattcgagtcggattcgagtcgatttcgatcgaaattcgtcccgaaaaaacttggaagttcagacgaggttttttttcactctaagccactagcgccagccctgtgagtcccccgagtaacctgtggaaatcagcttgaatcatctcttatttcccatcagctcgctattcacgctgcacggctacacagctatacagctacacacggtttcatttctctacttcttcaccttcaaaacaacctggttccactagagatccaccgatctggactggtcctccacgcgggtcaagacgccaccccagtctgaacactctttgtcaacattgcctcacgcctattctgcctctcatttgaaatccccaattcaaaatggggtccactcaattcgggaaatttcacgtaagtgcggatcgattctggagaccgacctcctaatgggcagatgctgaccgcacaccctgtatgggtaccacaggacttctgtcgcgactcgaccctaccagtttgcaatgtgagtgagatcgttctcaaaattccctataatggctggaatgtcaactgactgtatcattcgtcgtgtacagcttttcaccaatcaaaccgcaactgatgccttcggcgcgtgcgatctgaccggcattcctctcagtggggatagacaccttcggaacttaggtacgatctgcaagaccgaggtcgatgtgattggggacaaatgatatgagcacgattgctgatttttgataggttcgattctgctagccttcatcgctattgtcttgagcttgggtatgatatggagatcggacaagaagcacgctgctgtcggccggaggtatggaatatctttgttcgctattgagatgtcgactgacatggcggtatttgcagggaaatgcaattatttttgctcggtttcatcattattgagatctgcgaaatattcacagtgggcggcttcccgctgcacgacgcagtccgaaaggtaggatttctacatgatagactcgaggcctcggctgacagaaacatctagggattttctgcagtacacatcgccgcgattacggcgaattgctgggtccttctcatgaacgcactggttggcttccaattacttgacgacggcaccccagcttccatcggtctcatctgcgcatctgctgtggtcctcttcatcgggacaggctatattgcattggacactgcattcgattggactggccgcttccagtcaagccatgatacaccaaatcgcaacatcgccctctatgttctgtaccaactcttcccactcgtctgcattgtcttgttctacgtcctagaggccgtactagtgcttcgggttctgggcgagttccgcccaatgcgtaggtttaccacactggactcaaaataaacatgtgctaacggtgcaacagtgtatctcagcggtgctggcttgttgttcgcaattggtcaaatctttaattatgttatcagcacccacctgtgccaggcctcgcatggcaagatcaatggagctttattcgaaactctcttcaccctcctttctgtctccggggtctgggccttctggagtagtatcaccgaagacgactggcctctgcccgtgggtggcggtgcttataactgatttgataagtattccatttgcattatctattgactttgctttttcagtctcttgcgtgcgaatattaacgcctctaattattattttttgccatacatactttctttacgcttgtttacgagtctggatcttgaactgggattgtcgacgttgtgataccccatttccttgagtcatgtttcacgattcatctgccatctcttacctttacggtggttatcatgccttgttttgtgactcgttccagcccatctgtgttttatgaatttacctgcggcagtttcgatctgccagtctgactactggtcgaccacttccctgtcggcgtttacccgttattttgttttatgagagatacctcctcgccatgtacttagttgtaacccatgtcaaataatcgactttagcttctcctttcccgagttcattaacgctaactaaaacagccgattctcacccctcatttatatgaggacttttgtgcaaatgcccctccagtctcttatattggtctctgatgctacctacccccagtacggacattggggaaagacaaactttctaatgcgactcggtgttaccactagggtatgctagtttgcacatcgctttatacgccatctcccaattggccaccagtgtgacatccatgccgagggctgagtgtccatcccttgtgctgcgactcttagtacttcagtgtatataataagcaactatctaatccaacaacagcgtaactcccttcatagcccaatagataccgaatttggacctacccctctcgtttctttgttcttaattctctccagaagttgtcgaatatgcgcttcaatatcgccactctcgtcctcgcctcggggttcgcctcagctacaggcacagctcatgtggtcaataatacctacatccagacctgtacatataccttttcataaatcaattattcgaatgcaagttcgataagctagtatactaatacaaggtatacgcatagtgcaacaacagaatctagatatcgtccggcagctcccacagatgtgtagtctcgctgcttgtctcaacttgacagcccagattatgtgtattgctaatgccattatcaatggtgatccggctgctctgcagaagtgcttaacgacttccatgagtcaggtatatttctgccttcatcgagtgaacaaagactaagattcgagtctaggtctgctcatgtgttgcttgtgttccagcggttgagaatgtgcttgttgcgctcggtatctgtccagtttcgagtgatgtagacgacgatgagccttcttctgggtaatggccatgcagtcctcggccacgtgctagttaaaggtgttgtcattgcatgtcatacatagtttatgcttctttcctagtgtaataatgctagttaattgtctttctcctcttctcatctctatcggcgttcatgattaacttagtatcagggacatataggcaagggctccaaggttagataaatcgcataatgtcagatgtagtcacggctttcaaggttgggttaagttacgacagtagaggaatctatatctctagcaaaagtcatccagtgattgtcagattagtatagaattagttatgtgcagtgggtatttagaggtgttcaagaaaggaggatatcgagtcctgcacctgaactgaaaacacgagactcgtaattaatgtacgtgaaattcaaagtgcatttgaatgtatcaacagggaaagcttaaccaaaacctttacacacctcatagtcgaactttgacatcgacacatgggagagtccactcccgtctccccaagaggctgcgcacccactccaagccgactcctgtccactcggtgggccttgactccattccattaggagaaattcgttgctggacaccctccaacacagcaccggctaaaactttggcggtggagttcatagtatcgaaaacaaattccgttagaccctcgccagacactgttgcttcgtatgtggcgttgcccgaaatggcatagttgctaggctccgaggtatagcgtggtgcaaaccaattacttcgtaggtcaaagatgcaccggtctgaccaatgacatgacgagacgaagagaatcaggagcaatgcggagcagtagatacatggccggtggatgatgtatgtcaaggcaacaaacgagatgataaagagcggggaggcgttggtaggaataaaaagaagaggtaaccagctataatatgaatcatatgggttagtctgaatcccctactttgctgctgattgctagttgattgcttctcttaccttcgtagacagaacatgatggggtttgcgggcgctggtcttctgacggacggaaaggtgcagattgatggacaaaagttttatttgacgtgagttggatatcctgataatccagtgagctcaccaccttcgaactcagtaagtgaaagtgggttaaaagaagtaacagtaatccgattcactaatgacgcgagtcgggcaagaaataactagccacagtcgccacaactcggcaggctccagccacacccacggcttgaacaatattaccgagagttcttctctccttcatcctccctctctacttcaccacgttcttcaatttcatctctctttctcgtacttatctctgatttgctcttttgccgccttttctagcctttgtgatttccaatttcatactctgtccctctcgaaagagagcttctgagagctctgcaaagcttggatcctatcggcggaggtcgcctgtaaccacggcgtaacggcagaaatgtccacccccaccgatctccaggctctcttagccagtatccggcctcgtccttctccttcaaacactcctggccaggataaccaccaggcccagcgccaatcgtattaccagcctgctctgttcccgccgcaccctcaacagcagcaaccttacgatggtcagagctaccctcatccccagtcgcatggttaccaacatccatcagtatcctcaacttcccaaagtcctgccccaatgaatgctccccctcatcagagctctgatatcttgagccctaacatgccttctcctcggggcgaatggccccagcagccgcaaccgcagcataccaactcaggctctgtggaccttttgaatcttctgagattcagccagcgtcccggtgcttctgctcagccgcaggtcccagctgcagctcccgatcacttgcagcccccgccggcccagggagctccttcgtcgcacggacgaaatatttccgcgtctgacttagttgctactttgttcggtcaacaggcccctgccgcccctgcggctgcgcctgctggtcctcccccggccttccaatctggtcagcctgagggccctaacgagaatacacaggatatgttacttcgcctgctcaaccgttctcggccaggtcctgctgtcgccgaatcaccggcgctggcttcaactcagcaggtaccatatatgcaggctgccgttgatgaacatcagaaccagacagccaagaatgtcttcatggaagttgtggatgagagtccaagggcgcctgcgaacccagaaacggtcgtatcgcccaactcgaaggactcaatgttcacctatgtcaacccgtttgaccaattagccgctatctctcctgttaataagtctcctcagtccgcttctggtatccagagcccagctgttgaagtgacgcagaagcaaaagatcaatgtttctactaagctggagccttcgcaaacacccgagcttgcggccccccgggaggggacccagtcgccaatcttgaatgaagatcagagagaggctgtgcatgaggtagttggtcgtttcgtagatgagatcagccgctctctcagcggcgatgagcctcgggctgcaacggaagtcaagactgctgtgcctactgcccaggagaaatcctctgaagcatttctttcatcaatcgctagtcaattgcgcgagactactgctgaagctaaagaagcggcaagcttgacccaggttgacgagctcgtgaaggagacagaatctcccacggttccagttgccctgaaggtgaccgagagcactgaggctctagctgacagctgggagagtgcggaagacagcgccgaaaaggaagaggaacgagttgtctctgtttacaacttcccaatgaggccattcatctccattgctgtgaaagctacgtctggcaaacttacgaccttccgtgacgacgatgtcatggatattgctcgtctaaagaaggagttcgatcaacttgacaggtcgctgacagcggctacgtccgaatatattgtgtacgcactcgccaaaactggtggcatcagaattattcgacaggacgatggtagtgaccgacaggtgttccgttccactcgtgatcgagtcttcaacgttgcgctgtgtacagctcctaccgcggctggtgactccgaagtccaggcaattctcggcattggagtcagcggctctgtatattgggctttgatctcgcgttctggaaaggatttctttgatatggatgccttggaaagcgaaagcttgatcttcccacctttcccggcctcggacgagaacacctctggtggccagctgaaaacgcgagccaagcggagtactcgtcacaccaacttgtttgccattggtcggggcaagaacatctacgttgtttccccaaaggcagcaatgagccctgcctacggcgtttctggtacccagcggacagttaacaccgagaaattcttcaaggagcgtgcattgaagatttccactggtaaagccggcaaagacttcgccttcagcgatgatgattccgtcatcgcctcattggacaagaccggccgactgcgcttctgggatataaatgatatgcttaatgacgcaagttttgtggaaggccctgctcctgccgagatccgggtgcccttgactaccttcgtcactggctccccaaccgaaaagtcctggcccacttcggtcctcttcctcgataagcttcgcgcttattcgcggtctatggcgctccgttatgttttggttgggctcaagcaaaaccacaccttgcagctctgggatattgggctgggcaaggccgtgcaggagttgaagttcccgcacgagaacgagtccgatgctatttgcagcgtggcttatcacccgtcatcgggtgtcattgtcgttggccatcccactcgtaactctatctactttgctcatctttcggcccctcggtacaatttgccccagatgtcacaggcagcctacatccgagacctgaatgataaggataacaccctacctaagcccgagtccactgcttgcttgagtggaattcgggagatctctctcggttccaagggtcagctgagaagtttggagcttctccctattaccaagtccgctactgacaagcgcggcaccgaggaaacccccctatttgagctctacgttatgcactcgcgcggtgtgacgtgcttgaatatcaagaaggaggatttgggctggactgcggataacaaggttattcgccctattgatgcgttggagcaaggcgtgattgaaatcagtgatcttcaaactttccccacatacgccaccgatgatccatctcttaacggtgacaccgcctctatccagtctcgcgttggtccgaaggagtcggcgaaaaagccagagattggagaattggcttctggagttgctccttcgcgtaacgcttcgcctatcaagttggctaagaagaaggaggagatcagtgaggcacctgccgtggtcgagaagtctgaaaagaagaagaagaagaaggcatcagctgccgccgaggctgccaaggcaaaggagccatctctcactgctggtgtcgaacctctgccggtccccgccgccgctgccaaggaactacagactcttgcctcgtctactacggcgatgggtgccacccaggcggccgaacatgcagtgcccggtttcggtctgtcaagtgaagctttcagcaaacacattcagacactgcagggcagtgtttcaagcgagtttaacaagagtcttggccatgagtttgagaacctccatcgtcgcttcgatgatgaacgtcgcagctgggatgctgcctcgtcggccaagcaagaccaagtgttgcgcctggtctctagcacgctctctgacaatgtcgagaagaacttagcacgtattgtctcagccagtatccagaccgatgttattcctgtcatcgccgatgccacctctgcagcagtcaataagcaactgaatggcgctgtctctcaacagcttgggggtgcgttcaatgaggagttgcgacaggttcttcccaaggctgtcatcaatgctatgcagcaggcacctgtggtaaaggctgtctcggattcggtcgcacagaaacttgcacctcgcattgaggcggaagttacccgggtcatgcagtcttcgattgcccccatgattgagagtttggcacgtatcaccaagaaggtggagtcggatatggaacgtcacttccaggagcagattaactactacgaggcccaacgccagagtgataccgcaaagatcgaggagatgtcggccctcctgcgtggcttgtccaatactgtttctttgctggccgcgaatcagggccaccaactccagcagacccaaagcccgcagcacgagatcccccaccgcgagatattgaacgccaacaagcactcgactagacagccaagcgagaatcaggtgcgcatgccgcagcccttgtctcagcctgtgcttcagcctcaggctatcccggtccaggccccggtcccggttcctgtcgcttcccctgtcgcgcgatcccccgaggaaatcgaaatgggggatattgtgcagcttatcaatacggctcactatgagcagggcactatcaaggttggtttcaatcacttccatatattcggtgtttttactaacgttaaatttcttagtggctccaatcgaaccagcaagctgatctttttgacaacttctttgtccacatatctcccgcctacttgtctcgactttctgccatcgtcatgctctctgtggccgttgctgtcaccactaccatgcagaccaacattggccagcgcctccactggctcgaggtggttctccaaaatgtgaaccccagggtatgtcattatcctatctcaaatatttgtaatattctactaactctggctttttaggacacggatctccgcgaagttgcacctcgtattctggacatcatgagccagcgcctcaataccctttacatgtcagtcgttgagcgcaacccgcatgacccaattctgcgacttatttcacccctcgctcgccgtgctcgcgaactgcacgccagcctttcttaaattgcgttttatttctcgccttttgcaagtatatgaactcggggccacgatgagttcatgatctcgatacggacccatcaacggcgttattatcttgctttttagtatgacgtgtaatgatatcgaaggaatgacaaatacaaaaccagaaaaaatacatgaattcgatcggagaatatagtctctctggtaatcttcggggatgggtggaacggttatcttggtcatcaggtcaaacacaccttgacgaggttatgaagtttcctttgattaggacacattatttgataccaatgcacaccacttgtatttgctatttttccgagggcatattctatgctggtctaggcatagcactgtgaatgctggtaaagctttgttcaacctctcttgcttgtatttgtctagttcttgtactctcatgttattgagactctatcgcttaagattgaagagcatccggaatgacgaatggtgcaatgctcgccaatttctcgtatgtctccatcagctcgcgctgtggcccgttcaactgaaagatgacaccagctccagcttgaaccaagcacgatttcgatccggctagaaatttacgaggaatgatataatgacccacgcaacacttcgctctgctaatcaagcaattggatgaatccaatcaaagcgaagcatagccgtacggatcgatcaaatcccagatgcaattaaggctaggtcttgttatccccgcctgtggtctgctgaataactaagtgggcaggtctctctgactcaggctgaccgacgccgggctgctgaaacggtgaacgaggacgaggatggatcaccgaactaccaatgccaaagaatgacaagctggggtttgcaccccggaaaccacgcttgcggctgcgataactcgcatcctcccccgttgtgagaggtgtggccgtgctgtgggtgtggctgatgtttgagatggggaccggctcgggcccctcgtatgtactggtgctgatgacgctggaaatggtcgatgggaggtgatagccagcttttccaatggggacagagaggccatgtacaacctgggtttggtcagaaggtgactaagataggagggatgtaggttaggttatttagggaggagactcacaatactgcagattactaaaaaccagaccacaacttggatagtctccatcacttgctttacgtcccctggcacctcgccatcgacttgtatcttgcgcaagaattcacggctgattgacaggtagaagatagcgcccactccgatgggaccgaagaagccgacgaatgcagcctgggagacgagctcgatctgcgggatccatttgtgcatggccaagacgattgggaggcggcggactaggaggatcaatattcccaagaagatgagccgattgattggaatcacgctgttgttcaggaaggatgaccatgggcagaccgctccaaaccacatgaagacagacaggttaaggagcatgtcgattgttggttggagggaatcgtctatggtctcaaggcggaaccagtcactgtctctgttagcattcatgatatcatagcctgcatcgaggtgacctactcttgcgtgaatacatttccagcaatgaaacaggccagaagatcatctgttccaatcaaaccacaggttcccacgatgaacagctatttgagaggttagcaaagcaccttttggggggggggaattcgagatgaactcactgcaagagcaatggcaaacaccaaaaagctctcccggtcaacatagcgcttctcctctgcccagtgcaacagcttcctcgcaatccaaccaaccacagttccatagactatgctcaacagaatagtatatgcccaggtctcatagaaccacaacgccatcgccttccccgcaccaccgctatagctctggcttcccatcccagtatactggaggagataaatggcaaagaaaaggaacgggtagccaaggccatcattggcgccagattcagcgataatgattctctgcagctcgcggggaacatgtttatcggcaaatttgcccttaacaatggagttggatagaacggggtcggttggggtcacgcatgcgccgacgaccagggcatggaggaacttaaaattcggaaccatggcccagatcagtaggctactgcacatccacatggcagccatgcctggtccaaggagtagccctaggctccgccattcgatctgcagataccgctttgggagttggactccggctaggaccagctgcacacctagcactaagcgggtaaaatgcaaagtgattacctcgaggttttcttcagaatggagtgcatagtcatccggtctgatgaaattggctgcatggggagagaataacactccggctagcagggagattactatttcatgttagcaaatgtggtgataccaggatgacttaacacttacatgcttcggataggtagaactgctccttgcaaaggtaggatactagtccgaatagggaaacaaaccctccgagcgtcgcgcagacgatgttgaagttgatcaaggcgagtgtcggcattcttgtctgcactatatcccgcttggaatgttctgggttttatttgggggcgatcgggctcagatgtatcaaccaatggagtattctggattcagaagagtcagatcaatgagatctagagacttgggtaatgtctgtaggtcaaggtcaagccaatgttattgaatcatagtttgaatttcctgtgtgattgtaggcaagatcatttggatatatggaagtgactttgaagcaaagaatggtagcatttgtatgttgctatgggggtgaggaagatataaagatacgaagatgagatgtctgtggttgggacatcccgggtcttggcacatgacctatatagtacactatagtacacagagaactacagagtcaactagttacttgtgtactaattgatattcctattccattggatgcaacattctcgctttgttttttgacaaaatgcctagtagtcttcatcaaacaattcatcgggcacctcttgggccacatgcagtgcctctgcctttgcagccacccccctttgggctccattgacggctaatttatcggcctcttcattgccggggtctttattatgacctttaacccattcaaacaaggtcttcaccttaaggtcattgcgttcctcgattttgatcagaatcgactcaaccaaatccttgttctcaactggcttcttgtcccgggtcatccaattgttgcgacgccagttgataaaccatacagtaacacagtcaatcgaatatcggctgtcggtgattatggttacatctcggtgccgaggggcaatatcaatcgcccgaaggatcgcggtcaattcagcgcgctggttcgtttgacgactgccctttagtggctccgatacgtttctgctgggataagtgacggaagttagaagacgtggtggagggtagtgaaaatagcccaatgtgcgagtgtacgaaccttgcatcgccaggcccaaagtatacccctaccccggccgatgctaatggggtgccattccttaatgaactcccatcggtgtatatccggagcatcccagggatacccgttgattgcgattttgttgcagtcatctggggggctgtcttgtacaccacctggccagtagctgggtctaggatgacgttggggtcgaacccatcctccgctcctgtcggcagtgggccgtcgcctggcgcaaactcgactccttctgcgtttttgggcttttcgggcattaccatatgagggccagagggcccagttgccacaccgaacccgactggggcctgtgtctgcccttcccgtacaaattcctctgcctcttcacgggtggagaacttgcgatatcgaggtcgcggaaacccgcgaatctgctcctgtgccgttgtccagtctgtgtatactccagtaacccggcccctttggataccatagaatcgtgtgttctctgagctctgcgattcggttgggagcttgacaccgttcagaaacgcgttggctgcttcttgcgagggaaacgattggactaaggagcttgtgtgtcagtctctagctaggtttgcgcgtctgtttggatacccagtgcgaagagcgcactcacagattgctcccttgaatcccgttatttgagctagacaatcattccacccatagtagataccgggtttgtgacccgccttgacggcataatatttggccggtgcgtttctcttgcgttttgcgcctgcgaccggcgagggagagggtttcgatcctggtgaagctttggggaccgggctcggcgagggtgtagtcttattcattgcggttgattgatcgtcgctagaggttgaggcgaggattgtgagggtggggaaagcagagaatggcctcttgtaggacccagttgttggaaattcactattcgatgttgtattcgtggctgggcggacaggaataaatcgaggaataaatcgcgggcagcttagaagggaacaccaaggtcccaacttcaaagctgaccaaacacggccgtgaattttgatttgtttgagatgtgtgtatttttgggttatgaatctgagaggtagagatgatcgcttagagggtcgaggaattgagaattaggaataaagaggggggaggaaggggagggggggagaatactcaatccagcctgttgccagcgcttgacgatcttgatctgacgccaattcctagttttgacgaggatattatttcttgtgtttggtttgattggatttgattggccttgttttcctatacgtttgtgctgattctagtgtttgtatatatatatcctagaccggtatatcttccatgtctcagatcaatctgttgatttcacactaaaaaataagacaaaagaatatatactaggtatatagagctaaagccctacgctcaatcgtctcaatatctcttgcacctctcgctgagtagactgcacgacgtgctcaacagagaccaccgcattgatacttccaatactcgcacccctattgaagccattaacacaaaagtccaagagatacatacagtacagagtccggatactcacgcccagatagtcctccgttggtgttcgccagcctctttagcctcattgtatcgtcggatgatttcctcgtcactgaccccctcctgggaatcctcgtaactaacaccaacaacagctctgccatcatactgtctcggaaagagatcagttgattggaatatgtcatgtcggatagacttgatggttgagactccgccatccgtcttcgatacgatggtctgtttaatcgtagacggcgcagggcattccgaggttgcaacgaactagactcggttagcaaggttccatctccacgagaagaaacaagacctacccttgtgcccataacaataccatcggcacctaacacagtcaattacctgcaaaaaagtccggaacaacctacctaggccgagagcagcaacacagcccctcccatccacaatgccaccagctgccaggatagcagtgctcgtattccgagtcctcgacagaagatctcgcacctcaggcaagagggatatcaaactggcaccctgggcccactgatgtcctcctgcatcggtcccttgaactactagagcatccaccccctgctgaagtgcttcttctgcagctttgatagttcctacctggacaaatatcctgatatcccagtcagcagtctcctgggcctttcgaatggcttgtatgattggaagatgatcggcgtcagtccgagggaacgatagccagactgctgctactcgatgcttctggagtatgggaatggcattgtcaacgagcccgttcggctggaaagtcaagaaaccgacaccaagcggcaatggttgaccatcggtcaaaccgaggatagagcgggcatttgccagctcagcatctaggcctagaagatgggtggattcagatcggaagtcaaagcccccaccaataaaccctatagatggttagtctaaggtctagcagttagttcggtttgctataccgaatcctccggcctttccgacggcagttgctaggccggcatctgtaaacccaaacattggtgcattagcaatgaatggagcggctgtatgaggaaaccattgtagtagtatgtttgcagccattgtggtatggaggtatgaagagaagtcttgcgatgcggggcatatatatggctacctcgggatgtaataggtacgtatatatattactaatcgtagtccagttctaaataactagtttataacagaagagaatattgagcattatgtatgataacaaatatcatctgccaaaatattataggaaagtttctcgttcatagtactttaagaagcctcgtcctacatcaatcagtttcctggtctagcggttatgattttccgttaacaattgcttcaagcaagtgttccggaaaggttctgggttcgattcccagggaaactattttttggtctttttcttctcctcagaaagagtttttcggttgcgtgtggattgggagtggagatgggttgaagtggcgccgatagagtgggccagcgtgggtatactttttggagagaaaatcaccttcgcatacggttaaatgttgaatgcatgtaagataagaagaatccacgtagtcaaattataagaagataaacacatttacatttggttggcccctacaatctcgcacggaatgcgcgccgtaagggttcgagagcagtaggaccatcgtagatctgctgctcgacaacgcgggtgttgatctaagagcagagttagtagaacaaacgacaaagtgatgagggggaacctacatgttggagccctaattgatcaatccgttccaccccaagcagccgcatacatgtcttgatctcatcgttcaggactaccacagagttagaaatagaaccagatcaaatacccagtcgacttactctccaatgttcgacgaacaccgtcggctccaccagccgctaagccccacagagccggacgtccaaggccaactgctttcgcgcctaggcagagagccttgacgacatctgtgccacgacgaatacctccatccacatagacctcgatcttgccgaagacctcggggcagtatttccgaatttccaagagagtatgaactgccggaggagcagtgtccatggcgcgccctccgtgattagagagaatgatacctttaacctgaggtgcgtggagtgaggcaaggtatgcatcctcgtgagtctgcagacctttcaagacaataggcagatccgtctgagtggcaagccatgccaaagtatccgtccatgtcaaggaaggatcggtgcctgcgaacagttgctgaccgacacctccagacccttgggttggattgggggtatcgtccgatgagcgctccgcggcctttaccccgctgggcacggcagcggtccgtccgaccatgccggctcgctcatcctcctcgcgtttccctggaactggggcgtcaagggtaagaactatgaacttgatcgccttgagcttctggatgcgtgcaagcatcgtctcactctttttgcggtcaatctggacataaatctgccagccaaagatttgatctggagcagcatctttgacgatctgctctggtgtcatggaagcgttattggaaatgatttgcatggccccaaagctgcgacatgcttctgcgatcccggcctcaccagatgggtgacccagacgggccatcgccgcgggagacacgtaaacaggcgtgttcagtttatggccgaggacggctgtgtccagatcgcactttgtgcaatccacaaagactctaggtcgcaagagaatggaccggtaaacctcattgttgaagtttttgctgatttggtcgtcggatgcggagtaatagtatgcccaggcctttttgctcacttggttggtagccacttcctcaatctcgtccaagttgaggagacactccataggtggtggaccctcaatttcttctgcaggttcagaggatgcctgctcctttggtaatgtactagcatcgatggtccccaagcaggcctcgggcttaagctcctcctctaagatacctggcgggtgaatgggatcgtactcctcggtggcatcctgcccggccaatttcaaaatgatctttgcaccgccggggtggctgcccaggaaatcggtgacctacataaagagtcagacgtggccggggaatgaataatacacaatgggaatcgaatgaaagcgtacatcgtagaccttgccgtacagaaccacccaacaactctcacgagtgttgtgctttgcgactatttcttcagtcagtcgaaacatcccgcgtgggggtcagggaccggtgcggagaagcaataccttctgtcgcatcgaatacttttgccattctcaatcacggtgcgaggttggattgaatggtagctcttagaggctgcgactgggtattctctggagagaggaatgggaagggaaaaaggtgagagaagtaaattggagatgcatctcgaaccccggagagtgtggggaaccttcggtcgctttttcctcgttggggaattttcaattgccggccaagaagggattggaatcgacacgacgttattggtggaatatatttggcctattatcaagaatcagaagagaaaagttcattgtatacggtatacatcatatacatacaacatagtacctgagtcactatacacttccaaggtcccacgtgagagccaagggttccagttcacccgcatctcttcccctcgaactcttccactgcggaacccaacttccttgaacttgtgacgtcggatatcattccacgaataattcacacttgaactctttcaacatttcgcgaccatgtttgaggtgtgtttaccgtgtttacctagaatctccctgtctacccaatattcttcatcccatcctgtcctacctcacccagtagtagtggtctgactgtctcagcgtcgtgcaggggatcgttatcgccttcgaatgcaccgagcccgttcggcagtgctgacttcagatgaaatggtcgaggtgcgtgcggcccaacgcacctttgagggggcctatgtccgaactgctctttcgcagttctccttcgccctggtcgtactcaagattttcaccgccgagttctacagtattggggctctattcgcgatatacggcacgggagttctcatcattggacttttccgccgttcgcagggaaacagacaattcttctctgaagtaggagaggatgggatccatcggcacaaattccgtaccagtggaaatgcggtcttggtcttgacagcactgagtattgcggcatacgcatgcttgattggcctgaccttgaacctgagcaactgataaggaacattctgccttgatggttgcacgcgattcatccatacaccgtatccaatatccctggaggctatcttctaggcatgttatccgtgacaccccctgcgttaccgccaagcgccaaggattccgcacctgaccacggaatatgggttaccattttcggcgcttacggtagcggagatcagcgtgcagcaatggacgcctacagttggtcggagatcaatctgttgtgacgaggaccgaaagtcgccaaggaagccgagtatggatcagcccgagcggtgagactcaggtcatacaaggcgttccaataattattgttcgattcactggaggctgagttcgattcccaacacggagggttatctagcatcaactcgcggcgtgccctggtatcccttacaagacgggaaacccaacaggtatgagcattttggtggattatgaggatattgtagggttggcaaagtgcacaggggcgagattgagcatggttcgatgctccaccggcgtgtttttctcggacctgtacccgtatgctttctagccaagcattctctattagatataggaccaatacatcttgcatgattttgtgagacctccaatcgatgtgaagtctataagagctgttcaatcctggatccgacctggataccttgcatctccacatctttcccctcatgctgtatacactttgacatcatatgggcgatcttcaagccatcgatccaccatccagtggactaagtcaattcggcagcgtaatttcatcattcctaatctctgacgtccttggcaatatccttgagtgatattgtacttccacatattggacaccaacctcaaaataattacctttgcgccaaaaagaacatatataaaaaaaaggaagccaaccactttgattcttgcaaccccttgaatatctcaggtggtcaacatcagacccagtgtttcccgttggttgactcatccaaacctcacaacactttcccttccctcccctctcccatcatctttttttcagttgcccagctgtgacacaagtccttatccaactcaagatcctgtgagaaagctctgaaaaagagcaacattaccccttcttaataaaacacaaacacagaactatcccccagtgggatggcgcaacattctagcattgcccggtcggccatgacgtcggccacttcgcctgagatgggggaccagaggattgatattaaatccaacggcacctccaatagctcgggatcgggaaaagaaggagctcttatgcccccgaaaactgtggtcaaccgagcgctaggtaacgacctgcattccgattcccacaaatcttcactgccgcccaagggcggagtcggaacggctttgacagacactccggtttctaccgctcctccgtctccacagatgtgagtattgtttctttttttatctagaacctttgaacttcactatgttcgagcctatcacaacgaggcttgaccggctcatctcgggatgagttcagttccggggctctttgctgccttattctgagctaatctaccttaccccggactccaccctgttgttttgcattttgctgccttacgacttacttggatgcgcttggcgaccctgtgactaatatgatccttgcagatcgggcctttatcagcctccgggtactcccggtcgagtgcgagcaactaccctcgatatccccggattgaccaagtccaaagtgtctccagatggccgtattgcccagcgcgatgtcggtgcgaagcttgtcattgtcatggtcggcctcccagcccgaggcaaaagttacattacgaagaagctggctcgctacctgaactggctccaacatgacactgaaatcttcaacgttggacagcgtcgccgtgtggccgcgggaaagtccccttcacctgtcccgcttgatcgtggccatggccggaaatcaagttctttccacaaggatctcgttgactcggtgcgccggttgagtgtcagcgttagcaccactttgaactcatcagacatctctccgccagagaacaatacaccgcttccgccaccagtggtgccaaccaagattcttgtgaatggagaagaaccggaacaagtctctctcaaccaaagtactgttgtaccctcgatcgacgcaggccctgcacaatctcatgagaacgaagaagctatcaatgaagcgtctcctgaaccaatggaccagaccgccagcttctttgacccccagaatcagcgtgccgtcaagatgagagagcaggtcgcgctggatactctcgatgagttgcttgagtatattctggaggaaggtggcagcattggtatcctcgatgcgaccaacagcaccatggaacgccgcaaggcgattgttgaccatattcgcgatcgtgctggtcctgagctaaatatcctgttccttgagagcagctgcgtggatcaggatttgcttgaggctaacatgcgcctgaaactttctggtcccgactacaaaggccaagacccaaccgaggcacttgcagatttcaagaagcgtgttgctctctatgaaaagtcctacgtgcctctcggcgaatacgaggagaagcatcgcatggcttacatccagatgatcgacgtcggtcgtaaaatcgtcgctcaccagacccatggcttccttgcctctcaagtcgtctactacttgctcaatttcaatctctctccccgtcaaatttggatcacacgacatggcgaaagtctggatgatgccgcaggccgcatcggtggtgactctgatctcagcgaaaacggaagaaggtacgccaaggcgttggctcgcttcgtggatcaccaacggaagcagtgggaagcatatcagcgacagaaacaccttctcaagcacttcccgcctcgagctggtgacatcacccctcccaacccatcctatattccccaggaagggccacgcaacttctgcgtctggtcctcaatgatgcaacgctccgttcaaactgccgaatacttcaacgaagatgagtacgacgttaagcagatgaggatgctggacgaaatccattccggcaagatggaaggcatgacatacaaggaaatccaagagcagtaccccgaggagtactcccaccgcaagagagataagctcttctaccgataccccggaccagggggagaaagctatctcgacataatcaaccgatcgcgcacagttattgttgagatagagcgcactacagaccatgtgctcctggttggacacaggtccgttgctcgcgtactcctggcctatttccgtggtctaaagcgtgatgaggttgctgacctcgatgtcccgatgggcgttctgtacatgcttgaacctaagccatatggggtcgagttcaaggcataccgctacaatcctgaatccgattggttcgattaccttcccaattacgaactgcatcaggtcaaagcacacgcctagaatttgaacatggaggttcgaaatttcatgacttgctacgacctatcatgacttcttttatgggatgaattggccggtgtttaaggcactggtcattttctattctccttcacttttccgctctttactggactgtatccttgatttttattttcctacttgcgccttgattatgtattatctatgctttctcccctccactgttttccggagcgttcttttattcttttacagatgacctaggcactcgttacatgacgggcgttttatctgtactttcagacctgcgatgctcgctagctttatgagctggaggtgacaggtcaccaagagcgtctctccctcgacgtttcattttcggtatctttgcaaatgcaccaagatagaatcagccatggttttgcttgatagtctcaatagctttacttgctacggcatgtcaatagaactatgcagacgatcataataacaatgaaatcatttaacataacggcatccatagaacattctgatcgatgactatatgaaattccccctaacaacattctttattccttctgctcggccttcaccttctcgaagatctccatgaaggcctctggttcatcagccccttcgacatgatatctcccttgcactgagatatacggcacaccagaaaccaacctgttggccgccgccttggcctccaaatcaacctcctgagcaccaacatcctcatctaacatcttcttgacactctcccgatccaatcccgctccaacacccgcctccacaaggaccttcaaatccgtgatattcttctcctcctcaaaataagcccgaaacagctgctccgcaaccctcgtctgcaacccaccaacagcaccaccatcaccaccttccacaccctccttcctagccgcatcttcagcctcccgctgcccagcaaaccaaagcaagcgatgcgagtcccgcgtgagaccagtattcccgccaaaactaaactggatcccctcatccttgcccacagcagataggcgcgcgaagatcgcactcacgcgctcagccccgaatttccgggtgtacatctcggctttgtttacgccgggatactcggctgatgctgggttgaggtagaatgctttccagtgtaggctgaatgtgtctgctgggtacgtggcttggtgagtggttatcgctcgtgagaggcggcggtagccgacgtagcaccactttattttttatggttagtatgtaggtctgacggggtttcgaggaatgcgtatagatctgtgtcatatggttggaatacttacgggacagacggtgtctgagattatctggatctggaagttcgtcattttgtcaaggtgtgagggagacaggacaggtgaagtggaatttgggatatctttgctttcttgtattttttttgagcttttctttggattttggggatgacattcgatttgtaagcgttccgtccggtttcaggtggtttctctcgaatcttctaaaagtgtacattctcatgtgctgggagaaatgaaataattgatatatatcacaagtgtctccgaagttattttgaagtacacgctatcatccaacaattacacgaaggctctacaggtacttccagttggggacctgataatccagaaggctagccggctatatattcaaacaaacaagccctagaaagactatcacagaatctgctgggcctggttcaagttattccacgaacctcctgagctgctgtcgaaaacagctgatgagttggaatgaacaggtacactaggaagcgggtgatgacgggcacgatctagtgccgaggaatactgtgaacgattagtgagaaagctgggctgaaagttgaacgaaaacgattgggaagtctaaccttgaagacaaagttgaggattaaggcaactgccaaaccgatgcagactacgataggaccgaacatgttgtctaggtcctttccactccgctggcggatgagacgggcccgtctctcgtatatgaaccacccccagactgcggcgaagatggcaaagaatgtgtagacgacagctaatgcctgggctacctggttgtgcttgccagcagcattgtagaggcccaatgataaactcgacaggaggatactgatgtgaagccatttgataaatgttcgctggttggcaaggtagaccttactttccacacgaacgggcccagcgtctttgatccagacgccggggtgtcgaacaccaggcggcaaagagacagatttcgccccaagccagcgctgaggagaaagtccgaaaaaccgaaatatggactcgaggcgagtgggccgctcgggttcttcctctggttcgggagtgggtccggtatcacggcgctggggctctgggattgatggacgtgggtgccgcgctgcaggttcggtgactgctgaggatctccgcatggccgagggagagcctgcactggagtattggtggtaaggtgacccgacttgtgggcgaacacctgggctgcgcgcgtctcccatgaagctgcctactgctatgttctcctctgctcgtcgagctaatcgctcttgctcctcgtggaatgctgtttcgggatcacggcgaatatcactttcaagttcaccaagccagaagggaaagctgttgacatagtcttcaaacagtgaggctacgccgtggacgaacttggagaagcggggagcatccttgacaaggtgggagaccatcaggtccttgacccactcggtgttatgggccttgcctcgaagctggatctcgagcaaagcgtgagggaagcgagtgatctctccagtcctgatagcgctgaagggataagtcatatcggcatcgtccaagtcggtacggtgccactcggcaggatcacgacatggacgttcactgtcgagggcatcttcccgaatgagcgcgaggttggtatcgagggaaatacgaattcgatcattgccaggaatttggaaggcggtacgcgtgtagttcgcccggagcatgggttgcaggtcattgtccttgataaaggactgcagctcatccacgtcccttttcaaggcttcggcggcggccgactctccattggtcgaatcctccatgcgatggacctttttatcgaagcggtactcgccgtccaaaaactccttaacgtgcttttctttgagttgcaccttgacttttcgactttcgtcgtcgtcggtgacaatcttcttttccaactggatggtaggtttgtctttcagcgatcccgtccagcgcagtcgcaaagatccggcttcgggtgctcgtgcgaccttttgattgtagaggtcaaactgaggggaatcaaaatagagagaagtaatggtggggtcttcagtgatggtatcgaggtccttggaagttcccggcctgtagataagaaccggcaatcgacgaaggatgtgagtcttgacctccaaaacgttgtctgagtgaacccagaatttgtaagacgaataggtctcacggccaaatccatgctctgtctcccttggttgcacaatgtcctggttcagagtctcccgaacaaaggagtacatcaccgagaggcgatggaccagcggcgaatagtcttccgagttgaacggcagttgtgacagtcgcacttggagcaaaggtttcacccgatatcgggctcctcgtttgcggtcatgcttctttgcagcctttaggaagccagtgaagttgattcggctgtatttttccaaggcactgacttccttggtgatgctatcaagttcttgcagaacttctgaggcaatagcccttttcttctgttcatcgagaatgggcgtttcttgctccggagtagatgccaaaggtcggagtttagcttcacatgctgttgtccgttctcggagttgctgcgatgtctctgcttggaaagaattgaccttgtccagctgtacattgagcagttcttgcacaaaggcttcctcatcttgctcagtccattgatcgtcatcggagtcactgtcgtcttctgcgtcccgggtcacatcgttctctctcagcaaggtcttcagcttggtgtagtcaatgtacttccctttccagggagggtacaccgcagcacggagggtttttccaaaccgcattttgagccagtccggttgtgcagtcgttactcagagatggccgggtggtctgattaggaggtttcgaaggaaggaagagataagagagagaggattgagacagatcttcagttagggaaaacaaggtaagagctgaggttcaactgcagatcgaaaaatatgtgcagacgccaaaagaaatagctcgttagcttttaaaacttgcagctttagaccgaaagcgttcgatagccaccgatagccgcacgtgctcattggatgtggccaatcggattctgaaaatggaccggaggatgaccagctattcggataatctctgttccgacggtattgtatgttactttacggtacaggagtacgggaagtacgggctagaccgatatcgccccccgtcgggaccagagagagggacgtgcacatggactctccgataccgatatccctccacaatccaagggatcctttgacctcttaagtatagacttgatggagcccaagtctacacaaacctcgggtctgtcccataatctgcatggcgtattagccgagctacatcgtcaaccttatccttacgtcccaaatcctccaacctgcaacaagcgcgcctcggttgccttgattattcgggtacgaccaacctacgaccattggcccaactcaaaccccacaaaagatgcttcccagccagttccacaacgtttagatgagttcttctcacagcaatgggtccagcatggcgaaccggaggttctgttcatcaagcgtgcttcgcgcgtgggtgaccgatggactggtcatgttgccctaccgggcggaaagcgagacccggaagatgcagacgataaagctgtagccatcagggaagcttcagaggaaattggattggatttgacaacggaggataccattagtgtgggcaacctccctgagcggctggtcactaccagctgggggtccgaaccgtgcgaatgccattcaccttcgcctctgagaattggattactgacttgaattcgcagcttgatggttctatgtccctttgtatttctcacaactcgcagcgactccccgacacttcgattacagcccgcggaagtagcgtcgacacattggattcccctgcgcgccctcctatcaccgtcgctgcggaccgtggaatatgtggatatgtcgcagcgcttcgctcgacaaggcgggtttctggcccgtattgcaattcggtcacttatgggctggatgcagttctcggccgtgaggctcctcccgtcggaaacccatcaatgcactacaactccagggtttgttcccgaagagaatacactccaacctggcctgctccaacgtttcaagggatggtgtctgagtgggcaagcggagtccagtgatgctgcccatccgctgctcctctggggtctcaccctcggcatcctggccgacttcttggatatgctccctccccaccaagctgtgcagttgtggaaatatccaacatttaccgtgccggatctgcggctgattgtaagcattgtgacttataatctacggaagcgtaatgcgctcaatgtgagatcgggtgctcgtcctagtaacacggccgctgatagcgaaacggccgcactctcagtcacacaggagccggatctcggacatgatcacaatgaagtgggcatcggtggtctcggagtaggcagatattatggtccgaccgaccaagcaagagatgggacttcttatgctgttggaatcatgctgcgcgggtattatgaccgcttgcgcatggcaatctgggttttcctggcctggcgtgtagccattggttcaattgttggtatttcagcctggcgaattcttcgacgactgcgttgaagtgtacattagcaatatacagttgcaataaagatgtaaataataaagatttcccgtacatcgaggtacatcacatgtttgggacatgcaaataccaaattacataaggaacagatcattacggcattcggtcagattagctcccccacatcctctctggggggtaaacattgaacattgaacattgcacacgactatcttcgatttcaccatctcctatactctactcattatggcggcagctcaaaaactttacccacgaggaacagtcaagcgcattgtcaaagcccactccaatcggagcgtgagcaagaatgccgacattttggtacgttgtcgtcctgatatcccctctcttatccagttgctaatactacctttctagatcttcttagactatatgctattcatgcaagagtatgtctccatctatccttgtggcggttgcaacccaattggcactctcactgccgccattattggactggcgataagttaacacattgtaggttaatgcgcgaggcatcgattcagtcgcgcaagtctggcgaaaaaaacatttcagcgaataccgtgcgcaaagtgactgaggtgcgtttggtcgatctaagagcttctccggaagactcgtgagaacacacagctgacaagtatgggcttttttagaaaacactgcgcaaattccagggatagaaaagcccagaacataacctcggtctgcccattatggcgaatacctgcctagcatggttgtgaaagacgaggggatcctgtactaagactggcttgcattttgtgatattatggcgttgtgggcgaatgtgaatatgataccctggagcaatacaatagaagaaatgaataaatcacaaccaacagatcagttatctcataaattacgcgtttaaagatatagatagtactgtgattgcttaattgcttcgcgctacgcacgcgtcgaaagagagagagagagagtctacttaaagccagtgggccacaccgaccaaaggctttccgacccgcatgttgattcttccttcataacacacgtctttccttcaacgttatcgcgtttaatccttcattccagacctgtacaagcttttcagaaatactttaatatctgtgttacccacattcccatcatgcctcccacttccgctacccagaagctcaaggacgaggagaagggctcgcgagcttcaagcgtctccaaggatcccgagagccccaactctgaaggtcaagagagtacctacttgaaggagctgcagaagtatgttcagaatcttatgaacccagtggcgtggttattgcctatgcgcaagtggaagtgacctaactgctttgtttaggacacttcgcaatgccatgaagaagttggtgagttattttcgaatgatactttggtttcgattgtttccattgacaaattttaacgttgctatttttctgactagaactcccttgccaaagtcgacgccatcatcgccgagaaccccaacaagtcgcttgatgaactgatcgaggagaagaagatcaacaacgaccagaaggcacaggtcctgaagaagccttcccttcaagctaccgttgctcaggctgaggagcagattggccactacaaacaatttgctgtccaatacgaggaccgtctggctgcccagaaggctgcgcttgtcaaggcgcatgaggcggagctcgaagctgtccgtaataacgccattgctgatgcaactgaagcctccaagaaggcactgcgcgagcatctctataccgtgactaagttcttgtgcgccgcggccatccttcgacgcgacggcgacaccatcaccaccgagagccgtgctttcgagggtgttctgtttgaggtgtacgctggcaaccagtctgcagtcaattcgcttctgaagattgctgagggtgccgatgagaaggtcaatgctgttgagggcaccattcttgattttacctgtcagtaatgaatttcccagccccaccctcaccgaatatctttgaatgtgcttgctaacattatatctatttagatggcgacgtgaagcaagcatccgacaagttcgctccgcctgaagaggttcctgaaattgcctcggaggcaacccccgccaccaaccctacgaccgaccctaccgtggctaacgcaggactgaccgagctccaggatgcctcattcggcgccgaggcccagcctgcagcttcccaagcggaccagttggctcctcctgtgcagactctggtttctgatgctgcaaactctattgcggagcaaacctgggctcctccttccgatgaaagcagcgaatgggtcaaacttcctcgcaatccagatgagaccgacactggccttcaggctactccagctagtgctgatgcgggtctgaacaacggttccgttggcgctgatgtttcgactcaaggcgagaacgctgccaagtctggtggacgccgccgtcacggacagggacaccgtggtggccgaggtcgaaatgatgctaagcgtactggtgagggccgcggtggcgaaggccgtgctggtgaaggtcgtgctggtgagggtcgtgctggtgaaggtcgtaccggcgaaggtcgtggacgtggtggccgacgaggtggtcgcggcggacgtggtcgaaacggtacaagcggtgctgcctccggctcggcggaagctcccgcctccagcgagtaagagtggcaatcttaggatgtcagttggaacatgctgttttgggatcttgtctcgaagtcgatgttccgacgagagattctaggtctgtctttccgggactggcctcagcgatttctggtccgatgtgatggctcacgaacgcaacgaattttcttcacggagagtcactttgatctcttcgtctggctttgccaaagtcttcttgaccatgtcctgcaatttttttcagcgtgcatattcccgatcatcagagagcttctctcacgacatacatatgtattctatgctattgttttatcggcgcttgtgaacggaccggtggacagggcttaggtcgggcatagatcgaaattgatcataatgagtgcactattactttccaggacttgctgtagatacccgtattttacgatttgggtcgctttagttgaacgaaataaggtctactaggtctactacttgaatacgtggatggtagtcaatggcgtatgataactagttactatagatgtactccgcagtattgtaccatagtcagtcacgtgatgtaactagcttggcgtaatgtaatgatattacacaagaccgaatcaagtgcggggcaattatgcataaaataatgtaaataacggaatacacttgaaatgcgcttgtaaaggcgtgttccgttattactagcgtgttttaagatgaaacccgtttttagcgcagggcgctaaaccacaataggaaatgcataccgacgcccagtggagctcctggcgtattcaatctgattaaaatggtctttgtgctcttgcacaagtgtcaacttctccagattcttgtccttctgctcatttttggttctttccgccctcctccttatatcttctactgtatatatggcaccagcaacaatggccgtcgctggcgcccaacgtaagggggtgctgaaggtgttgatgctctcgctgttgttagatttggtaagatcaaggtacccattcaaagtcaacaatcacatttattcaattaacaatactttcagatctcctttacattcattctgcccctcttcccttcgctgctatcgttttatcacgcgcaagatccatcccccgattccctcctcaaccgcatcttccactacctaaacgcctacaaaaattcctttgcgcgccccattgactcgcgttatgacattgtactccttggtggagccctcggctctttgttctccctccttcaagcctttgctgcacccgtcataggccgcctatctgaccgtcatggccgccgtcgcaccctgctcgtctccatgctcggcaacctcttgagcgtcgcgctgtgggtgtcagctacggacttccgtacattcctcgccagtcgtatcgttggggggatgagcgaggcaaatgtgcaaatggtcaacgccatagtggcggatatcacagacgaggagcaccgcggctctgctatggcattagtcggggcctgtttcagtgtcgcgttcaccttcgggccggcgctaggtgtagcgcttagcagtatcaatatggttgccgaaaacccgttcatcgtcgctgcaattgtgtcttttgctctaatatttattgagactgtgtatctttgggtctgtttgcccgagacacatccccgactgacgacgcttaagatggagggcaaaagtacctccacccagaataatgatgcattgggtaagaaaaccgaagataggagcagtgctcccgctaagcgcacccatacaaacaatccggcccttctcaatgccctccacttcctcttcctactcccattctccggtctggagttctcccttcccttcttgactacaacgctctacgcgggatcagccacaacagtcagccctgctgcgttgaacggacgtctcttgtccctgatgggcttaatcgcctctctcctgcagggtaccctggtgcgccgtctcccgccgctggtcaccctccgtgccggtgtcgtggcctgtaccatctcattcttttgccttgctcgcgtttcttcaccttcaggtctctatgccgccggtgctttgttggcggtaacgactgctacggttgttacgtcactcaacagcctgggtagcttcgaggcacaggatgcggatcgcggcgcggtcatgggtggtttgcgggggtggggacaggctggcagggcgactggtcctattgtgttctgctctctgttttggtgggctggccgtgaggctgcttatactgctggcgggttcgccatgtgtgtcgtcacagttgcagctttcagcttgctgaagtcacctgctgtgcataaaaagactgaataatgtatatagaagcatactaataaaaaaatggtcacaatgtcttgctattcctttttaatacatcaacttatcagtatcagctccaaaatatctctgcctcttctagcttgctattcttcactcagtctggacatgtttctcggtgttatagttaggaggataacgggtagcagactacgatgtggcacaattcttacaaaacgacaattccgtgatttttcattgctgtctggttttttcaagtccgtaacagggtataatacatagaagagtggcgatagtatgtctcaaggattctaacagacaaggtcaagtgaaagagaggacttcaatatcaaaacagcccatctctcgacacccataatcaggcgccgtaaagccttgagtaagaaaacatattcgagctatataaaaaagacacaatacagcaagaatgtaaatatgaacacagaagccatcgtacgttctttcttgtcttcgagatatttcatttgatgacagattcgctcgagttatgatcgaatatgagggtgaagtcacgacctccggccactgttggaagcaagcccatgactctcaccggtcgccatggcaagtccagtattggcagccgggtccaacgagccacgcgccttgccaataagccagtcagtgagagtcacgaatttagcagtccggtcccagccgtccgcttcatcggcgtgctcgatagtatgagtcaggatgcgaccctcctcatcgaaagaaaagataaagatgccggtgaattgctcttcctttgacaacttgaagataggctcttcaccaccgagaaggacactcaagccattgttagtgccttttgtggagttcgagagatgactattttgtgagaatggggcatttttcgagggatttgtagaattgatattccaagaggctgggccatggaaggggcggctttctgttcgtggctcggttttccaccgtactagtaggcgctcatcgccgcagtcgtgatgggcgccgtgacgcgtggggtcgagtagcgtcccggctcgtacgatcctttcgctgagaatctgcaatttcacatttccgactagtggcacgctgctccatgctaccgggacagtccataatgccgcgcgatatagtgtgcgtcctttgacggtggggaggtgtggatgtgtggatgggaataggtgaaggttaacactcggggcgaggatttcggtaggtaaggtgttgtacaagatggtcggtaaaaggggtgagaggattcgtaaagctttgatcgttagttgaacggctttttggaaagtgaatgagacagtgagtacatactctttccgagtttcaaggttctctcatctggcggttggtgatcgtttctcccaaggccttccacatgctccctccgcacccaagccggggagaaatatgtgactggtaaaggtgcaactgaagttgaggtcaaccagggctcactgagaaggccatgacgaagttgcgccagtcgctgtcgcgaaaccgaagcaaaaagccggccagagacagggctcttcggctgattgagaagagacgtgcgcagggagactagcttcggcattctgcattttaaaagtatgttgtcaagccatgtagataagtggaaggttgaagttggtcggagtcgcggagtcggagagtcggggaaaatgacgttgtgggagccaatcacgatgctctggtatacaatttgattcaacttatatttactgactaggacgattcgtgacaggtctacagcttcccggggactaattaaaagtattattcgtaatcccaacctcaagccaattcatcatcgtcccccattcccatgacacgtcgttcagccagatcgcggatcttgtcctcaagaatgccacgtccataacgctgggcaattttagcagccgcctcgagcatcttaccgttgcggtccgtcatcaaggccaccagctccagcgccttcataccacgctcctcgccctctctgcattcaatggccagcatctgcagcaagttcttatccaattcgagctccctccgcgccaagtcagagcgttggcttgccgtcgcattggtcgatgagagaagatcgcggaagagcgacaaaagcacatttccacgtacgaatgactcctcgaaacgagcgccctcagccgccgtgtctccggattcgctggaatctttcggaagagtactggcaaccgggatctggaagtcgaattcactgagcagcggccgtggaaagtaagggttcttatcaccacccttgaggataatacagtggaacttgtcttgtgcgacagccaccggccagtatgtttcttctttccgccctcccgcgagacgtgccatttgcttcgtgtccaggagcggtacccatcgggcttggccgggtgtgcgccagtgttgcagaactagtaggacgccagtcgactcgtatatacaaggatcctaagaagatggttaattccatagccaactcttctgtttagatggagcttaccccattatcagagaaaaaaacactctgtagcgaagccccttctggaagagcgacagtgtcttcgttttggcaaatctcgtcacgcttgacattctccaccgtgtatcgtaaggttgcgtggccatcaattcctatagggccgttgccgatgctcataatgtagtcgcgccaggccgcgcaagtcacggcttggctcttctgtcgatacaccttgaaaggtgtcccaaagagagtgtacactcgaacatagtgctttgatgtcacagtgacaatgtatgaatcgctgagcgccagagctgatagcgagaattagtaaggtgaattgtgtagtcctttgagttcttacctcggatttgttctccctcgggcaattcggttcgccagtccgctcgcgcagtccacgtctcatgtggcctgtagaaaatagtggccggactgccatctgaagggttattggcaaaaagtgttccgttgtcgtctatatccgatcagccaaaacccaacacaaaaggataagcggaaaactcactcagacaagccttgtcgtacatatacggatcagtgaagtggaaatctcgatgagcttcccggtcatagaattccacagtaacagtgtgatgtgtctcctggtccaccgtccagacagctcctgtcaagttcaggcctggccaagttagcaaatgcactacaatgagttggaacaagaacatacaaagatatctcctgctcccagcccaaggcgtgctaccgggttgaagaggcagatgggccttgggcttttcgaagccagagtaaaggcgtttgttactagtgtcgccgagatcatcgagatcatcgtggggccgcttgccataaatatttaactcttcatcggcatagccagccccatcatcatcctcgatgaaatcgatcatctggtcatctccaccaaggatatcatccaatgagtctggcgaccctcttctcgcggctcgctggatggcctctttggaccgctccgccagtgtggttcgcccaacattgttggagatctcgcccagaggcccaagtaagataggagctgcctgcagcggtttatgcagcagagactcgtgatccctcggtacaatgttatcatagatgaagagctctccgtctgaagttgtaaatgaaagtgagtttttggtcgggtgccaggagaggttcaagacatttgcaaactcgtatcgctgcaagatcttttgcgtctttgcttcccagagtacaatatatccatctgcagctgcagacgccagaagagatccgttcggggcccagctcaaggccgtaacgtcgccggtatgaccgccagcaaatgttttctccttcttccattccgaggttgagtagatcgagatatctctggtcgcttccgcagaagcaaatgcagtaccatcaggatgccacactgctcttgatgtcgcctcggcatctggccccagtcgtcgaatcactccatcgagtttgcggaccagctccggctcctcttcgtgcatagagtatatatagaggattccatctgttccggatactgttgcatatcggccactgggatcgaatgtgacatgcttcgttcccttagactgttcccggagatacttgacttgcgtcatgtcgtcgactttcacgattttgactgtgagctcactagtccaccagtgtcagcatccaatccactgtctggcacaatctctacagcacttactcgcttgctactgcgacccattctccatctctcgtcactgcaatgtccctgactggcaaagcacatcggacaagcaagttttgcattttgcccgacatcatgtcgtacttccagactgttccgtcctcggcacccataataaaagaccgattctagcaatcctgtcagacctttccttcgatgcatcgtaagtcttattccaacataccgtagcaccaatgccgaaatgcgcgtcaacaccttcgtcgatcgtcttgggctctccatcttcgccgaccgtgtaaatacgaatagccgagttggagccaccagtaatgattcgtcttccgtcgggtgtgtaggccagtatcgttgtgccaggtgtgtctatgtggaggccgccttgtcagtaactattgtagtctctaggtcatcagcatgactcacgggctgggcgcccccgcgggcgaagagggtcgaaactcattgcaaacgaggcttggcgtagatatttcaatcaagatgcaactagaaagcctggagcatcgttcgatcttgatctggtggatcacgaatagccagggatctacaaggtcagacgcgtccgcgttacgcgccttgattgatttaacccgattggggaatattatagggctcagggcttagggtaagggccgctttctccagatattccatcttattgttcgatattgagtttgtagctgaaatagactctaagtgctactagcacctccagctgtcaggaaatcgaaatctgctccctcttgtgcttgattcactgatcgctcatacaacccgcggtagcctctcctctgctttcttacctgcgtctctcccacaagactctgtctgcgtgtctcgattcgagtctggattactgcctcggaaacttccaagtgcaacttcctagtttcgatgtcgcaaataatcaggtcaccggtctctaccacgccaaatggtgactctggtagcgcagcttcaggcgagatatggaggataatggttccgcccgcggtccctgacatccgaccgtccgaaagtcgtagcatatccttcactcctgcctctgctagcttctttgggatcggtataaggccagcctctggcatacctgggttgccaatcgggccaatgttttttaggaccagcacactgtccttcgtcacaacaaggtttggatcatcgatccgctgagcaaggtcggccgaattctcaaataccacagccggtccagtgtgtgatagtaagtggcgatactttgacgctgatgctttgatgacagcaccgtctggggcaagattgcctcgcagaacagccaaggatgacgcgggaaacaaagggtctgacattggccgaattatctgttgcgcaaaggaaagtcccttggactgggatgcatcgaggacctcgcccagcgtttgcccagtaattgtcacagcagataaatggagcaggggtcgaagcacttgtaacagcgccatcatgcctcctgcattgtggaaatcattcatataattatctccactcggtttgagatcaatcaacagtggggttttgcggccaatttcctcaatagtgtctagagtgatgactccctgcagttctggatgtctatttgcaatagcgagcagatgaacaatggcatttgtcgaacccccgatagcctggagcactgtgatggcattccagaatgattcctttgtcaatatttcttgtggctttctcttggccttggcaatcacaactgcatttgcgccggtctcttcggcaattcgcagtctcgcagatgatactgctggtgcagttgcgccccgaagcggcatcattcctaatgccgcagtcacacaagccattgtactagcagttcccatgacaccgcatgtccctatctgagcgagcgatgattgtaattagtgaactgaccttggaaatgaccgtgtatctgataagagcgcatctgcacataccgtcggagcaagctcttcgttaatggccgagatttcctcgacgtccatttcacccgctcgaaaagctgcccaattgtttcggcaatcagtgcaggctccaatacgctggccgcggtggctccctggcagcattggaccggtgataagtggtaggattggcttgttggctgagataccacccattaactgagcaggaatagttttatcacaccctaaattctgtcagtggctattctcaatactaaaaaaacgattggaactcacctccgatcattatacaagcatccaatggctgggcccggatcatctcctccgtatccatgctcataagattccgcaagaacatgcttgttggatgcgagaatgattcagccacactgatggtagggaattctatcgccagtcctccattgagttgcacgccgcgcttagcagcctcaatgagctggggcacattggcatgacagggattgaaccccgagaaagtgttgataatgcccacgattgggcgtgaaagcgcatcttctgaatagccaagtgccttgataaagactttgcggagaaagagagagaaatgaggatctccataggatgttagaccctgtcgaagtccagatgtggaagtgattgggtttgtgagatcgtagtccctattggaatcctgttcgtccattttattgtatttccttctgaatagcaattccacagaggactatcgaggaagtatagacacctgagttaggcgacttacatattcccctcctctcagtggatggtgtcatcggaacaagcccgattcggatattaatccgggccgagggggttgtacatagaattaaatttataagatctctctctctatgataaaacgctatgcaatacttccatgtaatctataccctcaacttcatcctcacccgcagctccttggtcggtcggaaagctccccagctagtcttgtgtcctggaactgagaggattttaccacttgtgggctcaatatcccataaggccacaatgccagcagtaaaagttaaaacagctcgctcgatgaggccattgttcgtcgatccatacaatccgtccgcaaagggagcaatgatgctttgatcagcccgttgttttcccgttgcaggatcagttacgagaaatcgtaggggatcatactgctctggatttgagaagtatcgagcatcatggtaatatgcaccatggggaacaatgatatcctcgccctttgcaatcttgtacgtacggagctccgtcaggccataggccgcttcttctgccgactcggaaagggtcacatcggacgccagcttcttgaacgagattcctgctgaatgaaggcgcacagtctcatagtaacatgctttcaacagcggacaagatgtaagcactttttcaatatccagagagagacgaggaggctcatcaaaggggaaacccgtctcctcgcgagttagcctggaagccatcacgtaagaagcaatctctttgcggacttgctcgagaagtgaaggttccgcaaagagatgggtaattgtccaaaaagtgatcttggtcgtgtgttcaatcagatcataatacagagacaagtgccctgcagcactggcacctggagatagctccaatttgcggaaagtccgcattctgtctttgaccaattcagagacatcgtcaagatcacgcagttcaatgccggggtcaatcccatcgtcccaagcagtcaaagctcggtgaaagactgaaaagatatggtgaagccgatcactagccgcatgtcctgctgaggctgctgggtgcggggcccatcgaggagtgccgacgaacaatgtcacaaagcaatcgtcaagtcttccaaggtcttctgagagattagggaaattctccacgaatgtcccacccatcaggaaagtagaagtgatgtgtccaatgaaattgctcacgagtgcaaacaaattggcttcacagactgtctggtccccttcatcgggcatctcaactccactgattccacgttcccaggggcattggtcaacaatgctccggcagaagcttaccaaattcggcatgtcacgctgcaccaaacgggtaatagtagacgaagcttcagtgacaaaagcctcttcattgagaatggtagtagccttgtcgctaagttcttggttacgatccaaatccagattgcggatgaggctgcggtcgccaaagacgttttgcagagcttgatcgagcacctggttgcgtggcgtggcagttttgacagagaaaacagtcttcatcatagatggagaagccacaacattgtacttgacaccgcgaatgtaaatgccaaagacaggctcattcatagactccctataatcctattaacagacgtctaggatggtaatatagtggaagaccaaccgagttcttgtaaagaaggtaacatgattccataagaaggcagggccatgtccaatccagggaaaccaataaggtgctagtcgcaccgtctgtgattttgaagggtcttgctcacgtcgacttcgaagccccgagataatacgggttgtgaggcatacgaacaccacaacagcaaaaaccgttgaccaacttataccgaaatatttctcacggacagtctgtataagactcaaggcttcgtacctctccattgtgattcgatgttgcccaaaccaaacactgccgagcaaggtagcacggttctacagcgccagcacccactcaagggctcgaggtagacaaagaggtatgaccggcaagtttggattgattcactccagagatttttatttaatatatccaggtgaagggtgaagggacacgatggcaaacggaggccggggcctttttctggcttactaagctcgagggtctcagctgggttctatttttgttggttttcatttgaatgtcaacattttcaaaatatattatgatttcgttctatataatgataggtgattctcagataataatagtcggatcaaagttgatatcacttggttcgcgtttatacttcgccgagaccgctaatagatctatatctaaataggagtccaaagaaaggactggatttagtactttttgtagtaacggagtaagattgagacgagatttatagacagtagctaaaagcttaatattccttctgcaaagactttgacaaggcagcactttcactctcatacttgagaatcttcgattgcgatccgtgaactttgcgcagaagccactcgatccgcgacgttagctcccaggggtactttggcagtgagccaaggacctgcagctcctgctcatacttcgtgatacttgaattctcgttgttaatgagctgtgagaggattaacaggtcaaggcggccctgcagggtcttgttctcaaccagacgttggaaagcagcgcgatacacgggtttgcccggtttgacgtatcgtgggaatcctttgtcagtcccgatggagacaagctctgcttgctctagtgcccggagagtgacctcgccgttgtccttgaatacatcgtcgaggaggactttgttgtacaacaggtttccatccttggagtgggcgatagacttgatcagatgccacgcctgctcacgggaccactggagtgtaattgactctgttccgaggatgaagagcttcaggatttcagacgccgactgttcaatgatacggtccacggcagctatacaatggttaatagaattctccaggtagaaaaaaagataaacataccttcaggtgtctctccggcctcaattcgatgagccatgaactccaagtcagtaactcgaccacccagcactttgatacaagcatccaagccacgaagcgtctctttgcgccttgcattctgttcatcgtcactatcgtctgcctcggcatccagatgactcaacacgaaacgacgaccaacttcgagcgagcagtcacctaaagcaattgtgcggaacacttggttaggcatggctttgctcaatggctttgcaaacgaggcatcagtcgtcaagaagattacatgggcgatatttgcggatgtcagaccagccgcccattcggtaagtttgtcgagcacgacactgtcatcctcgtcatagaggaaattgtcaatcacaacgacaggtctcacctcgggatgagcctccaggtactcatcttcggacatgttgaaatctttgtcctcctttcgtctaccttccaaggcgactcgcttcatagcaacaccagtattttgccagatcttgctcaattgcgcatctagagtctcggagaaaccggctttggtgccgatcattccctgtgcagcaaggtcaatgaagctgctgatactgttcatccaagagaagatcggtcggtagccgacctgagcggctgctcgtgaaatcttggttgtatcaccccgagcatcttgaatttgcttgcagtcaatgatgaccttatacttgtgctctttcagggcttgttccaaaaccaactcgcgtttccctgagccacgaggaccatggataacaataaaggtctccgcggtctccgttagccaggcttgcagttgtgcaatctctgtttgtcggtcttcccagatagctgctagacctcgcgggtctgactttcgcttcccaaatgagaacaggctcgctttgctggcttgtttgcgaacccactgtagcactgggttctcttcactctggaacgacgacttgattttgagagtgatgaagaacgtgcgaattggatcgaagatgatgaccgtgatagtagccaacagagcagctatagcagggatcactagtctcggatggttcaaaatccaatccctgatcataaacagcttgatcttgcgctcgtagttgatcttgaacctcgtaccggacttgccacctcctgcttcttcggaaacaataaatccgtgcatgcagttccttgccatcacggcgtacctagggcgctcgaatctcagaattgcatatcgtggtaggactttcgaatctgagggctgtgtttggatgtccagaattttaccgtaaggtcggaacaatgagtatagggactcttgggtcagttcggccgctgatttatctggcgacgttggtaagaactccacctttagggtctggcttgggattcgatagagatcttcgatccaaggcgttccgcgaacaaggtctgcatcgactttcaggaacggattgaaccagggcttaactggattggttttcaaatgctctttgattgcattttcgatactttcgtggctgatgtccgacttgagtgcatacttcacgaatgcgcctccctctttgtacctcgtcacgacctctttgatctccagatttaaatttgtgggcaaaactcgatgaacaatccgagtcgggtcggctgccgctagttctgggttgttgactcgtgccaaaagtccctcaagaggctgaatatggctgaggggtcccctcagcagccattgtagtcggtgcggaaatatatctagggctagttagtggatagacatgatagcttgcaattagtcggcgctcactattgacgtagataatcccttcgttttgtcctactgtaatatgtcccgacctgatagaagatgtgcatcgtatcatcgagcgtccccaaaccggaggtctccacccgcaggacgcattggcgctgatatgagagcgtgtgggagaccaaaaggccaacggacctttttgtaaaggtgtcggtctcattatggtcacagacacataccgaatagagagagaaagaaagaacttaggagagcgatcaagttgtgtttgtcaaattaatgacgtcggttcgtgattatcggagtgtgattatcggagtcacatgacaatattgattaccgcgaaaaagataacctcgcgatttcatggatcgcgatagatcgaccaattctttctttcacaaaacgaaatgggctggctgtggagctcaactcctaaggatcttccgaaggatgttcccaaggatattccatccacaattcctacggaatcagtaaagcagaatgcaccatcgaagaccttgacccccgacgaacaagccgacttggaattcagccaaatcctggccgatctcagagccgaggattcatcgctctcaaaacgaacagggctgactcctgatggcaatccgctgccagaatcccaaacaccttcatcgcccatttctcccgagtccctctaccaagatactatgtcctgccgcaatgccttcgactacgccttcttctgtcagtccttcggaggccaatttgtgaatgtttatcgatatggagaattacggtcatgcagcgatcactgggataatctatggctgtgcatgaagacacgaacttggccagacgatttgcgcaggagagaaatccgggaccacaaccgaaagaaagcgattaagtacaagacgggccccagcagtgaagatgtctgggatgtgcgtctagacccagccaaggactcgttcaagggagattttgctaccatgtggcaggagatgaaggctgaagatgaagcagcaaaacaacaggcgcaacagacggcttcatgatgtcccctgtttctcttctctccttgttacgatatgtagatatactcccttttgtttcattccctcatgtataatatgatactctccatttcctttgtgtatcggcgtttgttcgatggtcatatggaggacccggcggatccgcatatagcgatttagaggctttttgttacactgtatgatcttatattctcagatttgtcaatctgtctgtacgtggattctataagtctgccccacggcctataaaactctattgaagggagagaataatgctggagaaatagttgattggcgcaaaacgctcgaagagatgcttgaagaacgccgcataaacgaatgacctaaaattagaaaaaagacccccaaggccgtagacacaagagacatatctcaggatatcaataagaaaaccctaaaacatacttacctcatattatttcatagcatcgccgtgcgtctaagagctcagctgcgaagcaagcttgtaagacttattgctaagaacaattcaataagttagtatgtagcaattcaatggaggacatgtaaccaagatgatgttctccaattctctaattactcaatccaaacttcattctttcattgctcttcatcttcctcctttatcgactgcagtcgtgtcttgatgtgcttttttaatcgatcttcgatttccgctatcctagcattcacagaactgttgctgcctgtgctgcatgtagaggaggccacactagctgtaggtgaaggagtgaatcttcgcagagtcacaatctcaatccccggaccggcatcgaagttcaacttcttgctgagtctctttaccttggggctagtgggatggtcaacggtgagcttggccatagcagcagtgatatcagcgatatcagatggattgaatacaataggggtagatcgaccgcccgaatccctggagtgggaggtaagaggcctggaacgatttccggtccttgtggaattcttgcgcattgttgttcggaggctaccttcgacactcctaccgcgccctgatactcgaccatcgttatagtggcggatggaccgtcgctcaccgtcgagctcgcggtcagtgatgaagccgtttggattgagatcactcgcggcctcggttgtcttcttggcttcgttgtccatgtttgcaatggataggacctgtgaatctgtaaaataggtaagctggattagctaaaacgaatgaatggaatggaatggtccgagaaagcaagggatatgaggacgattatatagttgagccatcaatgccggccatgcaaatctgacaaagggaagttaccaaaggaataagtacaaagacgttgttgactcttcagctctttgttctttcacacaaaagacatagagagcatctagctttagagactaatttcaagtaataatggaacatggtcagatttgcagaaaagctatgtacagcagaaatagagatcaccgaatggcagacgctctaaacgccttgcagacctagaaaagaagagaaagaaggagaaacccgctgaagcaaaaactaaagatagaaagaaaaaagtagaaaagtagaaaagcaaaaactgaagaaagcgcagtactgaagccttttccattcgcgcagagaaccaaccccataaatcccgtttatgccacaaatttatcccatttgatgaacttttccgcatcaaaatgaaacttttatcgtgataatggccgtcaaagtcgtaaacatgtcctgcatcgccgctagattaagcagcaacctcagtgggttggggaacggagtcgatggcaggacgacggacgataccaccggtgactgggagctgagagctggttccaatgaggaaagcgtccacttcgcgagcacactggcgaccttcgttgatacccctggaattatattagtaaattgctagttataggaattcgaggaaaactcaccagacaatcagagactgtccacggcgacagtcacctgccgcatagacaccgggaaggttggtcgagtagtagccgggaggagtcttgatgttcttgcgagggtcaagctcaatctcatcaccaaagacacgatcctcggggcccaagaatcccatagagaggagcacaaggtcagcggggaagaattgctcgctgccctcgacggtcttcatgtcccagccgccggtagcgctcttggtccactcaactcggacagtgttgatacccttgacgtggttgttgccatcgtccacgaactcggtcgacatgacacagtactcacgtgggtccttgcccatgtgcgtcttgacctcggtgtgaccatagtcgacacggtagatacggggccactgaggccagggattgtcacgggcacgctctgggggaggctgaggcaacaactcgaagttggtcaccgacttggcaccatgacggacagaggtaccaatacaatcgttgccggtgtcaccaccaccaatgacgacgacatgcttgtccttggcagagatgtattcgccatccgaaagaccagagtcgaggagggacttggtgttcttatgcaagaactgcatggcgaagtgcacaccatctaattcacgaccagtgaccttgagatcacgcgcaacagttgcaccagtggcaacaatgacagcatcattagtggcacggagagactgcagagaaacctcgcaatcagggccaacagcagtgctcgcaacgaacttgataccttcagcggccatgaggtcgatacggcgctggacaaccttcttgtcaagcttcatattggggataccatacatgagaagaccacccattcggtcggcacgctcataaacggtgacgctgtgaccagcgcggttaagctgatcagcagcagccaagccagcaggtccagagccgatgatagcaacggtcttgccagaacgggtcttgggggggcggggaaccatccagcccatctcgaatccacggtcaatgatcgcgcactcgatggatttgataccgacggggtcttcgttgatacctagaacacaggagccttcgcagggtgcagggcagacacggccggtgaactcggggaagttgttagtcatcagcagacggttcaaagcatcctgccactgcgccctaaagaccagctcgttccacttaggaatgatgttggaaatggggcagccagtgtcagactggcagaatggaacaccacagtccatacaacgggcagactggtacttgagctcgtcctcgctgagacggtgggagatctcgccccagtcgcgagtacgggttgttgcgttgcgatacttctcactgcggcggctgtatttcatgaaacctcttgtcttgtccaagatcaacgctgatcgctttttatcggtcttggaatcgctaatgctgtcttcaatgtctagcaagtcagtcttcttggagtcgtcggccttggcctgttcggttttgaccggggtgctaggaagctggggaagagtgaattcggccttcttcgcagcctccgccttggcagcctcttcctccatgacgcgcttgtagtcggttggcagaaccttgacgaagtgggggagagcacgagtaaagtcaagcaggatgcgagcagccagctcggagccagtgtaatggtggtggtcttcaaccaagccacgaacaaaggcaatctccgatgggtcttcgatactggagatctcaaccatctccaagttgaccttggaatggaagtcctggttcttatccagcacgtaggcaataccaccagacataccagcagcaaagttgcggccagtaggtccgagattgagtacacgaccaccggtcatgtactcacatccgtggtcaccaacaccttcaacgacgacagtagcaccggagttacggacagcaaaacgctcggcagccataccacggaagtagcaagttccacgggtggcaccgtagagacaggtgttaccgacgatgacgttttcttcggccttgaaagcggctccgcgcggggggtagacgatgagacgaccaccagagaggcccttaccgacatagtcgttggcatcaccttcgagctcaagggtaacaccgggggcgaggaaggcaccaaaggactgaccagcagagcccttgatgttcgcatggatagtatcctgaggaagaccagcttcgccatagcgtcggctgatctgataggaaagagtagcacccaaagcacggtcggtgtttacgatatcacattcaattcggcagggtagacccttctcgagagcgagctccgattcggcaatcagcttgttgtctaagcgagtgtgaaggcggtggtcctgcttgcggacattgtaggtagcgactccagggcgcagtgagtgagcgggggtcaggatgagtgacagatcaattcgttcctgcttggcattacgaatatcgtcccggatcttaagcagctcagcacgaccgaccatctcgttgaccgaacgaacacccagcttggccatgatagcgcgcatctcgttggcgacatagtagaagaagttgataacatgctccggtgtacccttgaatttctgcctcagctcggggtcctgggtcgcaataccaacagggcaggtgttcaggtgacatttctagaaatattgttgttaataggccgttcgtcaggaaatcagggtactggatgtactaactctcatcataatgcatcccaatgcgatcaaaggagttgtggcaaacccatattcttccgctccaagcagacaggcgatggcaaggtcacggcccgtacggatttggccatcggtctgaaccacaacacggccgcgaagatcgttcaaaaccagagtttgatggggctctgcggggacccaattccccatattcttccgctccaagcagacaggcgatggcaaggtcacggcccgtacggatttggccatcggtctgaaccacaacacggccgcgaagatcgttcaaaaccagagtttgatgggtctctgcgagacccaattcccaaggaagaccggcatacttgataccggtccagcgcgaggcaccggtgccaccatcatgaccagagatcaagatgtgatcagccttggccttggccacaccagaggcgacaataccaacaccaacctcagatacgagcttgacggagacacgagctcgggggttagagcacttaagatcgtagataagctgcttcagatcttcaatggagtaaatgtcgtgatgcgggggcggggagataagaccaactcccggtgtggagaaccgagtgcgagcaatggggccaacgaccttatggccgggtaattcaccaccctcaccgggcttggcaccctgggccatcttgatttgcagctcgtcagcgtcggctaggtagttggatgtcacaccgaaacgaccagaagcaatctgcttgatagcggaccgcatcgtgtcgccgttctccattctcttgctacgctcggcatcttcaccaccctcgccagtgttggacttgccacccaagcggttcatggcaatggcaatcgtagagtgggattccatggagatggatccgtaggacatagcaccggtcacgaagcggcggacaatttcggtccaaggctcgacctggtcaattggaataggcgtacgctggtcgaaatcgaagtccaacattccacgtaaagtacagttcttaatctgctcatgtgcggacttggcgtaggcctcgtaagacttgtcgttcttggtgcgaacggcatcctgcacgttggcaatgctggtggggtcgttgatatgggcctctcctccatcacgccagtggtactcgccggattcaggcagaccggggacttcgacaatggggtgcgaagggtacccgcgctcgtggaaggcgaaagcatcctgggcgatcagatcaaatgtgataccacggatacgactagcagtaccagagaagcagcgatcgataacgctgtcgtcgatgccaagggcttcgaaaatctgagcacccttgtaggactggagagtagagatacccatcttactcatgaccttgaggataccaccatcacaggatgacttgtagttctgaataaccttctcatcggagatgtccttgcggatcaagttctcccggttcatcttgagaatacattctagagccaggtaagggttgatggcatcggcaccgtatcctaacagaacacaatggtgatggacctcgcgagcctcggcagtttcaactgccagggcggcaagtgatctccacttatttcggacgagatggtggtgcaccaggccggtagccaacaaagcagagactgcaacacggtcggcggatgtagcacggtcggagagaatgatgagcttgtcgccattctggatagcttcagtggcactgtcacagatggaatcgagcgcttcaatgtaaccagcggtgcccttgcccttctcgaatgtaatatcgatggttcgcacagtccaatcgttgtgggctatgttgacattcttcagagcattgaactcgggaatgctcaagatgggagagggaagacgcagacggtgacattgcgacggatccatttccagcaggtttccctgggggccgacgtaacattcaagggacataaccacagcctctctgatggggtcaatgggagggttggtgacctgagcgaagagctggcggaaatactcgtagagtaggcgaggctgctgggcgatacaagcgaggggtgcatcattacccatagagcccagcgcttccttggagtctgcggccatagggccaagaatcaagctgacttgttcaaaagagaacccgaacgctcggaggcgagggtcgttctgaatggtgttgtcgtccaaggcaaaagaaagatcaacgttggagtcaagtagcacctgattgatagcaggaagcttcagaagtcccttgtccaaccagccggcgaagtcctggcggcgggcaacagtctgcttgagctcggcgtcatcaatgatccgcccggccacggtatcaacgagcagcatctttccaggctgcaagcgacccttttggacgactctctcggggtcaatctcaatagcaccaacctcggaagcacagacgatgcggtcatcgtccatgacgtagaaacggcagggacggagaccgttacggtccagattagcaccgcagtagcgtccatcggagaaagtgaaaagagccgggccatcccaaggttccatctgacaagcggcccactcgtagaaagcagacttggctggatccatggctgggttgtcctgccaggcctcggggatcataatcatcactgcctcgggaagagacaaaacgccgttgatcatgagtagttcaagcacattatcgaacgcagccgagtcagaaccaccatcctcaacgatggggtagagcttgtccagctcgtcaccgaagacctctgaccgaaggacaccctcccgtgcgcgcatccagtttttatttcctcgcagggtgttgatctcaccgttatgggcagcccatcgtaggggttgggcacgatcccaggatgggaaggtgtttgtcgagaaccgagagtgcactagggcaaagtggccctcgtagtctacgttcactaaatcgtgatagtacgtgtacacttgaacgggggagagttgacctttgtagacgatgttccggttgctgagagagcagaggtagaaccagtttccgaggccgatgacatgagtggcacgctttcgtagaacgaacagctgaagctcaaacgttctctcgtcgaatatttcagtgtcggtgatctccggcttgttgccttcgccatatgccgatttcaagaccacaaatggctgcataatgataggctctcgagatagtgcggcaggaccaagaatggttgaatcccgtggtacttcacgccatccaagaactcgcaagccaagggacgtggccagttcctcaaagtccgcaatggattgcttgagggcctcctcatcgggcttgaagaacaagttgccgacagcatattgtcccaacgggggaagatcgacacccacctcacgggcgaagttcttaatgaagaacttgtgtggaatactggtcatcacaccagcaccgtcaccgtcccgtgcatcagagccaacggctcctcggtgggtcatgttgcacagcagattgcgggctgttcaattgctgtcagcttgatgtcttctcacgttgaacgcaaagagcagaacgctggcactcaccatcgctaacaatcttgtggcttgccttgcccttgatatgactgatttgtcggtcagaattgattttggtccacatgcctccaattgggcccagttgtaggggagatcaactcacgctgcgaagcctacaccacaggcatccttctcatattcagggtcgtacagaccttgccgctctggtagagcattggcccagccaaatccctttttgggttggtactgagaatactcatgaggagcctgttcttcacttatatctttgccatagagctcctccaagttcagacccattcttccgccgggagccgacagagaatggaatggtaactgaaggggactgtttttttgtttttagaaagaccccaccgatttggggattgaaagctggtgatgtcgtcacagggtatcgcagggtgggtgagggaggagtaaacgcgtcaatggtcacccagcttctgcgagagagttgaagatagaagaaggggggaaggtgagaagagaacctgagaaaaaaaaaaggagggggagagggaaaaaaagatgggcgattacggcgggacagtaggtccggggattgcaggccccgatgtacccaaaagggaaaattacaatggtggggagttctaccgtggcaaattgctaggtgaaagcagccaagagaatggcaaggaggttaagtgaaagagatatgagaacagtcaaacctgctacatgctacatgctcgatgctatataatacaacatgccatttagaagctcttcactgtgaacagacattttcgatataagagaagtcgagcaccgacggaaacagcccagagagccagcgtattgataatcattatgattacggagtgcaaatcatcccaagataagcatcgctcgaccaatcagaatgaagattttacgatctagggttagctctttactacgtcaactaactttacgggggtgtcactatatatgaggatatcagatttatacatctgctactccttcttctcgattcctagatccaattcatgtccacttcactttcctctttctcgattctcttcaaagctcacaaaacaaggtctagtgggccgggcggccccataggcccataggcccatagacccataaaaagctcagaggcgttcattggatatatacatacaaagtgtacggagtacggagtacatactcccgtccccgaaatagggcaaatcttcacatgtgagagagagacccgggtgaatgggcgcactcctcagtggggcaaaaatgtagtgcttaatccattcggttttgaaccggtttgcatttagtctgcatatctgcagggaacctggaaaggtactagagaagtaccagtaaaggtacagatctaaataagagatctcaaaaggaaaggataattgcagatgtatcgagtatggagtacagtatacatagtaaattgtttgacatcttaatgaaatgcataaatacctgtaacggtactccatactccgtacacattccgacaacggccaagtccccctgtcccgagtttcccctctctatcactttcttggccttgtacggaggagatgccagatagcccgatttcggggccctgaaccgtttgcgggttgccctctccccctcgttctttaggccactcagactggtacttaccggatatccaaataccagcccatttactgagaatgcctatgattccccattttttacattgtataacgtggacgagacagagtccggagggaaagtcatccagacatgtgaagacctagagataaggtagatgatgataataagaatacataacttttctctgcggatatcttctccccttttcgcctatctacatcgcatattgcccgctactataagtatcccgtacggagtactccgtactgtatctcaatatgaatcgggtgaaacaggatcttgtttatacttcacacacaccaattatagttaccgtattatttcaatcaccataccccggaaccagagagtggagattacatgatccccgccttttctagaccaatcagcgttgagataaaagtcagacacatccaacgtcatgatttcgggggaggctagtgtccatccggctttttccggatatcctcttgtccactttaggttcaccgggttgaccgctggcatcgggtgattccggatatatagatattcaccacctcaccactagatcttgccacttggtgagtcagtttgggattctcatggtgtacaactcgagaactagaactttctactcaggtagttattcggccgaaactgcgcatatatattgtatgtagtgtaagattgatgaaaggccaacatgaactatattttgcccttgggactgaaactaaacatacacttggtggttttgattatatccatccaatatagactattgttaagagcgatgaatattttcagtgttaataggagacagatatactactagaatatgattaacctcaaattgccaaatagtctgtgtatatatatacacggagtatactgcctatatatctgacgatctatatgtatgctgtagtaagttgtatatactccgtagggttgacggatcccccgcatagacgaattgattggcggtggagctccggcttttttttgcgttcgcgctttctccgaccttgcattatatcgtacgcctatattgacatctgcaattgttcttctctatagttatcctcttctttccaacataatccgatttcacatgcgtcccgaagtcctagcaacagtgggcctagcaacagttgcaactccattcgccacaacataaacaaacggctacaaagcactgtatctccaagtcgcaagacatccccgcaaagctctataagcagatacctcaaaataggcagagtattcgcaaatctagccttgaaacagcaattattgcagcgatgctcaccctttcatccatcaccccgcgcgacgtaagtgccaggctctgccgattcaagcttctcaatcagccccggaggaaactaacaacttgatagtcccatgaactttggttcggatcttcccagccatatcgctccacctccgatcaacaggctggcgacaactccgctgccaaccatctcgcccgacgcaatgctggcggcacgtccagcagtaatcgctcattcatgccatcccgctctcctgccaacacaatcgccacactggccgcggaagaacgctcgttacgcgctcgaaaattgaacatcgcgtcgttcgggtactcatggatcaggccggcggggtgcgccaagaccatgctcgggatgaaagaggaggaagcagagcgggaagaggcactacaggctgctgcggcggagttggaagctgcagagggagaaggcatcatggatgatgacacggggttgcagagaggggaaataggggaggaggaaggcatggagcgcgatttggatgacgatatccccaacgcggaggaggaggtctcgggtcttatcgaagaaggcgaagaagggcttgaggaagatgacattggcgacgaaggggaatacatggagcgcgacttggatgatgacatccctgaaggcttccccgatgacgactatgagggctcaggcctgtatgatgatgacgacgaagaggacgatttcgacaaccagcctgatttagatgcggacatacctactgccgacggtgagagtgtgagcgaaggcatgacgcgcgacctcgacgatgatatccctgatgcggcagagcaaggctcggagcaagaaggggaatggcagcacacagacagcgaagaagagctgagtgatgaagaggaaaacgaaaccagtattattcaaaccaggtttcccgagaacttccgcaccagtacgccaaacactcgtggtttgcctccacctccgactctgcgccgcgagcccgagactgaagcccagcgccgtttcctcaatcgctggagcggtggtggcgatgcgtttgattctagcagcatgctttacagcgacgaagagctacgcgcatccataaccagtcagggtagtcgacgaagcgggtttgcgagaaggttcccgcggcacatcggtgggcctagggatagtctgaactaaagacatccattataatggtatacttgttatgttcctctgcggcgttttgtgtcagcgtaaaaggatagatcttggggggtctatctcggagttttggtggcaacttatgatacctccttgtaacataatatattatatgagcaagttcaatgaacgtggcttcaaacgcattgtgaatatccacagtcctggaaagtaaggctcaacacgtagaatggtttgttatgttaaggcagtccctgtatattgttttatatgcattatgtacgggttacttgaaacatcttccaatatcaaagccatgacctctcctgaattatctccagagatgaaaaccagacaggtcccaacttgttgacttgaaagcggtatgtaagccaatggcagggttttgcattattgcatatacatagctcaaagaatccatagtcccaaaacacctcatagcgccaaagccaaggtttccatgctgaagaaattgaaaagtcatgtgcgtgactcgattaagatcaagtaaagagcaagtcgctgggttttccgtgaagtaagacgagagattaaagatgataaagacaagaaagtcgggcgtgatcgacatggtatagagcgcgagtgcagtcttagaaagacagcaagggtatacgttcagaatatccacacatagaagaacaggaggaagacagcgaaaaagaagccgagccagactcgccagccgatgccggtgctctcggccatgcgaagcatacggttcatattcccccggagtcggactcgcgtgttatcaaatgaatcgttgaggtcggtgatatgtgtggtgtctcggatttcatcgccaattgcaagtgtgatctagatggttttcttgtcagcggtttgttatttcaaactactaactgccctagttgggtctggaagtatgggtgcgaggcttcttacatccttcaacattttgaccttggcactaataccctcaacttcggcgtcattttgtgactcgagagatgagagaactgcatcggagtaatgtcccctatatcaaagccttggttaacaactatacatgaaagaacgacgggcgatcttaaaagatcatgagccattcaacgcactttttgtcgggcgatgcgctttgatatccacctccagctgcaccgctactcgcataaccattaagtgctggactggggtagcctccgtacccgtatccacctggttgttgggcaggcgatctgctagcttggcgtgagtcgccaccgtattgatcaaaaagagacgaagaggcgcggggatcacgttgacgcggaaagctattcagattaatgctgcattagccgactgaaggacacctcataacgaacggagggagaaacgtaccgtgaagccatgacggtcgtggagtgtagctagagttcgcgatagagcaagaggaggaacatggattgcagatcgataagctcttcaacggcaatcgagcatctcgcaagggtcaaacgcaagtctatcactgttcgagtcctcgatgtttgatgcttgcggagataaaaacatcaaagtggccatagcgttatcattcgctgaacagcacgtgatagcccaagtactggaaaccgacacgcgggatacacagcagatgtggttcgcatgggcatctgctattgtttatctggtcatttaggattgattatggaatgaaacgggcaaagcattgctcattctaagctatgccttggagatatccatttggtctacaagttacatcataggttaaaaatgggccaacccgtagtcaatggattaagtgtatattaacggggttggaaaattttttttccgaagagatattcattgattcattgtcatcacagaatcgcgagacatgttttggacacacgggaaaaaaacatcgtggaccgacccgtggcgcctatcgttcaaagcaattccatgccacccggaagttttgtattcatcgagcttagtcgcgcatctgatcatcatcgttggtctgggtgtcctcgcggacctcgtattcctcatcgtcatcctcgtcgtcctccatctcgtcggtggagatcttggagtagtcaatgaccttgccgcgtgtgcgtcggccaccctggatgatgttgctctggtcgatggggtcgttgagattgtcttgtgtgtcatcctcttcatctacagtataggaacagaaagggtcagtatggaggcaattggtggccgttcaggcgcatgtggtcattcagacatgggttgcttgggtgacagtggggtacacataccattgtcggcctggtcacacgcaaggaagtcagcataaaagaagcaattgcgcgtagaaattggagactcacaatctcgttctcgctctcagactcgctctcctcgtccatgctcatatcttgggtggggtcagccttgcccttgcccttggcaaaggcctcgtcgttggagttggaaatagtcgcctggtcagacataatgaggtttattcagggggtggatggagaattgtaggaaggatggttggtggaaagggacaaggggaatttaaaagacggtctgcaaagtaaggtctttccccctcgaaccaaaacaagctgcaagggcgctctcgccgtctgattggcggtcgcgggtgatcaaaccccgtgacaaatcctgccctgaggcatcaagtacaagtaccaatagaaagaggaactgaaagagcaaagtaagtaaactattggaaatacctacataacaaaatagacatatctaacttgttgatatgggcaagcgatagtcccaggctatcgacaatattacatactagaacgcttctttgtctgcatttgtgaaccatgaagaggcaaatttcatattagaacttatgatatcagctattcttctgtcaattacgaaagtaaatcagctgtccagagcaaagcatctttccacagacgttgcattattgccccaccattttggcatcgagacttgcttccccgctccgaaaaagaagaagacgagcaacatgttgaggttgaatccagcatcaaacgcagcagcaatcaggtagttgtatcgcttccagacctcgaaatggcgacggtaagcccaatacattacaatatatccaccaataatggcagatgtgtaaccagtactaatgttaccgtagaacatcgccaatcccccaaaaaagatactgacgttccacaagtcaattcgaagccgggggaagaagcggtggaaacagaagagaataggaggaatcaccgcccctacaaggaatgaccagggaagcacggtcatttccgtctcagcgaaaagcctctttggaccaagtacagcgtactgaactcccattgtgttggaggtccgcagggactgtcctgtccactgattcagtggatctgtttttttgccagtcagataatctcctttggtgtccatgatccaacgcatgacggcatagttgattggaacacccatacaagtgccgaaaatttgggagaagaaaaccgcgcggggtggaatgtgcatgtagtggccaatcttttggtcctggagcatatactgtgcccgataccaggcgtcacctgcaatagctccatagaccgaaggaccacaggggtgttggtgggcctcgccggcttttgtatggaccatgtagccatacatgagttcattgaatgagccggtctcaagctggtagttggaaatggcgtaaagccaagcaaaggggatgaccagaatggcagcactcgaaagtgccacaaacaacgtccagattgggatgaatagatgaccgagtgcgaagaatataatcagaatcacaaaagctaccgaaaatagaataccataccaccaccatggaatctctttgtattgtctctggataacattgagacgatcgtgatactggtgatgaatgctgtcgttcttcgtggatttctctgcattgcgggatgaccagattcttcggatattcccggaaatctgtgcgtatccaaaggtcaagatccaagtgaccgctgctggaagtttcgcgtagtcgaagaatgtcgcccacacattttgcaagcccatatacatcggcccatactcctcgtaagcggtcacgttcagatgatagtctggggtgagtacgtccagggttgggtattctgtaccgttgcttaggaaaaggttgtttgacatgagtccatgcttgaaggaacctagactcccccacttcgctgcaggaagtaggacccaacaattgaaagcaaatgccaagaacaagatgacctgtgtccagtatggggtcgtcatgattgaggatccattccaattcacattggaccaatccaacgagagattgaggaagcccatgccaccaatgcctgagccgataaagttggccaccggattgcgaggtgccacccagcagaggaaggccagagatgaggtgaatgggaagacgtactctggaaggaattgccacatggtcatccccagaagcgcgaagaagaagaccttcatctggcgccgtgcgagagcagaggagttgtctgttttgcgaaaagtttcgaacaatgtggtttgcatcaaagcttggggccagatgtattccgggtcaggcaaaaggagttgtcgggcaagcgcagcaaaggagtaaccaatccacacaattgaaagcatgaagaagattgcaaccgccggattgattcgtgtaccgtaccaaagctctgcgagcacgatgggggcatatcctagattgtacgtagccccagacgctgcagtcaatgtgaccaagacatgctccttgatgctccatggggccggattcaggctaaaagaaaagcgagtaccaggtagaccgatcctccagtcaggaaggactctggccataaagtgcccggcatagtgacaggcgatttgaacaaagaagatggagtatggtgccgtggtagtgcggaagtgactcatctgcgacagaaaggcaccaggaacaacaaagatgatggcgagcacaaagtaacggaaggtaattgtcggtaagctggggtcgtcggtcaaattgatcagatgtctcacgggcaagggcaatgcagcaatctcgggattatcgtgtatttcttgttcaatggcggctgattctcccttgaaatggaggttctcttcatctaccgcagtctctgccacctttgggtctttagagaactcggagccttctgaacccataatctcttgttctatttcgacctcggtgggggtttcctcgagtctcttacgcttcagtgcagcgaacatgtttaagaagatttccgatagcccatggaatatattttgcatgaagttatttaaataaaatagctcatgttgtgcgactggagtaaatattcgcaattcccatagagaaatgccccattggacgagtccaggctaatgccatcacatcgttacagctacaggggtgcggacaaatgcttagcgcggatggcgcaagccaaaagctttttttttttttaggcttaaaaagaataagaaataagagggaaaatagggaaaatagggctaaccagtctcttgtttagattttgtagatgatactccgtatatctagaatatatatatatacttggcaggggaattatagggttgttccaaggttcgttactggtatgaaatgaagtatataattgctacgcttcgctccgcaataagaacaacatagattggatgaaatagtttttatacatagattctgggctatattatttgaatgataatatattaggttctgtgagtgagatcaaaagaaataactagacaacatacaacacagtcttcgagttagttaggaagttcacctcgacatgttgagatcgacattttagagaattcaggttctgcctcaggctgcaaggggcgtacagattacgtcagccccacttgtgcactgaccaccggttggtcatatgaccgccgagtcgtacgttctgatttctgcccggattccccgcccggaccggagaaaccccggccgaagtcagctggaaaactctggtcgaacggggtgggggaagtggtcgggtcatgaattcactatgacgcatacataattgacagtaccagtaccaataataccggcacgagatggccaccacacagagaataccaggcggtccctatggcgacgtgtatgcaggctgtatcataccacaataccacactctgacaccttggaagtcagcccaccattacatcatacagccccgccataaagaaagctgagaacggcaaagaaaacccatatgaatcagagaggaaaaaaaaaaaaaaggaattgacatcgtcgacgctaaagttagacataatcaagtaatgtagacacctcaagactccactgggctcgtctggaacctactagagtcttaatgaaggacgtaatgaggtggttgttgggccatcgaagctcgtggaatctcatggattcccgtggaaggctccctctagaagcttctggggcaatacaccgctcactatatagcagcttttcgcagccttcaaccctcttctcttctttcctctctcactatcaaatacccttctactctctgtacactatcctcgtcagtgaccagtctctttctatcctttttttctttttaacgattacacacattcaccatggctcccgccgtcggtattgatctgggaaccacctactcctgtgtgggtgtcttccgtgatgaccgcattgaaatcatcgccaacgaccagggtaaccgcaccaccccctcgttcgtcggtttcaccgacaccgagcgtctcatcggtgatgccgccaagaaccaagtcgctatgaacccccacaacactgtcttcgatgccaagcgtctcattggtcgtcgcttccaggacgctgaggtccaggccgatatgaagcactggcctttcaaggtcatcgagaaggctaccaagcccgtcatcgaggttgagttcaagggtgaggtcaagcagttcactcctgaggagatctccgccatgatcctcgtcaagatgcgcgagaccgccgaggcttacctcggtggcaccgtcaataacgctgtcattactgtccctgcctacttcaacgactctcagcgtcaggctaccaaggacgccggtctcattgccggtctcaacgtcctccgtatcatcaacgagcccactgccgctgccattgcctacggtcttgacaagaaggtcgagggtgagcgcaacgttctgatcttcgatcttggtggtggtactttcgatgtttctctcctgaccattgaggagggtatcttcgaggttaaggccaccgccggtgacacccacttgggtggtgaggacttcgacaaccgtctggtcaaccacttcgtcaacgagttcaagcgcaagcacaagaaggatcttaccaccaacgcccgtgctctccgtcgtctccgcaccgcttgcgagcgtgccaagcgtaccctctcttccgctgcccagacctctatcgagatcgactctctcttcgagggtgtcgacttctacacctctatcacccgtgcccgtttcgaggagctctgccaggacctcttccgtggtaccatggagcccgttgagcgcgtcctccgtgacgccaagattgacaagtcctccgttcacgagattgtccttgtcggtggttccacccgtatccccaagatccagaagctcgtctccgacttcttcaacaaggatgccaacaagtccatcaaccccgatgaggccgttgcctacggtgccgccgtccaggccgctatcctgtccggtgaccagtcttccaagtctaccaacgagatcctgcttctcgatgttgcccctctttccctcggtattgagaccgccggtggtgtcatgactcctttgattaagcgcaacaccactattcccaccaagaagtccgagaccttctccacctactctgataaccagcccggtgtcctgatccaggtcttcgagggtgagcgtgcccgcaccaaggacaacaacctcctcggaaagttcgaacttactggcattccccctgccccccgtggtgttccccaggttgaggtcaccttcgatgttgatgccaacggtatcatgaacgtctccgctctcgagaagggtaccggaaagtccaacaagattaccatcaccaacgataagggtcgtctctccaaagaagagatcgagcgcatgctttccgaggctgagaagtacaaggaggaggatgagcttgagtctgcccgtatccaggctaagaacggccttgagtcctacgcctactccctcaagaacaccctttccgagggcaagctccagatcaacgacgatgacaagaagaaggtcgaggacaagatcaacgaggtcatcggctggctcgacagcaaccagaccgccgagaaggaggaatacgagtcccagcagaaggaacttgagagcgttgccaaccccatcatctccgctgcctacggtggccaggctccccctggcgctggtgcccccgagggtgctcgctccgctgacgaggtcgaggagaagcccgaggagcttgactaaatgtttcgctctgaatgacttgcttgtttgccatttggcactcgcttccttttcacgtcttgttttacgaacttatgggttatcaaggtttccttttgcgcatgattgcatagatacaaggttatctctttctagggaaaaaaatcctagtgaatcaattttcttttaataaaaacacaagtctcttgtacattgtagatcatagtattaactaactggtcttgttggacttaggccccattcggacctacctccacacttgcattgaagagtgaaggtatacaggattacatcctcccggaacctcgcgcaagtgatgagagtgaccaatccatacacgacggccagtatatatacatatagaaatacaagattcaaccatcaatattaattctctttgcgaggatctcccaaaccaaaactccaaaccgatgatgtatcaaaatcccgtttaaacatcctggaagtctccgttccaccaccgctgtaaccgatgcccgctcgtttgtacgatgcttccgtaggtgatttctgaagcgcgctcggggtactgctcgcgctggtcacggcggatgcgggtgagggcagcagagacacccatagccagggcgaagaggggatccgcgatcctattcatatagcgttagaatgatatgtctctcttgtcggagacagttggactgtgcggaagtatgtgtacctggagatgaggtagacaggcatgatctgctgagatttgggaaataaggtggtggtttcggtgattcgaggtgttatgtcgtacatctaagagctagaagagaataatcacgtgatgcggacactgcttgatcggttcatggccctccgtcttccacagcaacacacatctccgccatgcatttctcgctctcctctcttctcctgctagggattagcagtctggtgtctgccagctctttgacaattaccatccccgtctctagttccctcccaaacccgcatgtcctccccgcaaccagccatgccactctcaccactctcccctctagtgggaaagaccacatcctgtccgcatcgctgactcgctcggcgacgttcgtgttccatgatcttccatcctccaatccggatgctcagcccgagtcctacttgctcgatatctgctccgctggtggctacgtcttcgccccctaccgcgtcgatgttgcggctgatggatccattctcggaatctgggagacttttcgcgggaacccgtgggataaccgtggtgcggagaaatatgtagtgggtgttactggaaagaagcaagttgacgtggttgtcgaggccaaggtccttggacggaaggtcttctatgagcagcgtgctcaatgtgagcttgcctcctcttccccgcagatacaacctgtaatatttgtccatagctgtgctaactttgtatcgaatcgcagtctctcccttgagtcttgtcaagaacccaatggttttgcttgcagttgtcgcgctgggtctcatgtttgtcatgcccaagctcatggataacagtatgtctattccccattgaccctaatccaatgttgggtgcctaactttgttgtccagtggatcctgagatgcgcgccgaatttgagcagcactctcgctcctcgcccatcaccggtgccactaccagtgccatggctggtggcgggtttgatctggccagttggatggcgggcactggtgcacctaaccccacggccagcgatgtgactcaggctggttcaactggtagagatacgagtggtcctgcccggaggcgtggatagaagatcattgctttattatattgaccgttcttgacatggtatcttgtcattgtcacgtggctaatagtatgatacaaagttcactgaaggtgctcgtggctcataaaaatagagccgaataccgataaatgactagagcgatttaggcgaaacaaaagcaatcctcccaaatccctcccgatgtcaaagcgcctagagtccctcgagatgtacagaggcctgtcccttatgccggagtccatcctagtaacgaaagaagaaaaaagcagagcaatcaaagaaatcgaaacgcagccgagcttagaagtcgtctcctccgaagtcatcaccaccaccataatcatcaccgccaccgccgccgtaatcatcgttatcatgatgatcctccagagcatcggcgatcagcataccgccaagcaaaccaccaccaacacccagagcagcagcaccggcagttcccatacctcctccaccttgcctgcgaggcggttgctgctggtaatatccaccctgctgtgggtatcctccatatccacccccgtatcccggtccgggtccatatgcaggttggccatgctgcggaggatagccaccgccaccgtagtaggcaccagggggaggaccttgctgagcgtacgaggcgtattgttgctgcggccgaggtggcctactgcttgagctcgagctcttgcccatcagcttgctcaaaaacccacccttgctgcgcttctgttcctgctcaggcatcgggctatgcgacgacgctggaactgccgcatatccccctggaccggtggactgcggtcgcgaggtatcgttgtagtagtctgatgaggcgccacgatctcctaatccggccccggttcctcgtgtgtcggcccgggcgtcttcctcggcttggagcttggcggcaagccgtgcgtcttcgtcaatcgtgttagggctagtgttgcctgggccagtatttgttgaagggttataggggttgtttgatcccatgtgtttcttctggtcccccgcactggctattgctgctggatcgcctggcccggcgttgctgtatgatggtgggagagaattggcttcggggcggtcccattgcgatttgcccgtggcaaggtctacatagaacctgtgtggttgtgagtactttgctctttattaagatgagtagatacataccaagcgtggtatcgatcgtcatactgcgctgtccatccctcaggtaccgagggcgggggaggcccggaaggcggggcaaacgacatgatgacaggtattattgacttgaataggttgcaaggctgaaagcttcaatggtggtaatgatcaaaatgtcaagtttgaaaaggaggatgagagatgagtgagagagtgagagagtaagagaaagagtgaggagggagttcttgattcttccatggatatatacttagcggggagtaagcgggtaattgtggccttaggcatatagactgcgcctcccctggtggcggtgccccaatgtcatcattcaggccatgaccagtaagttaatcatggctttgggagttagttagggcagggaacatttagatatacatgcactgatgcagcctctgtccttgacaacgtactataccaatctgatctatttggcccaatataattcccccttcttgggattgggcgtcatgcaggatactataaatcgtatcaccttttctctgtgtacaaggttacaatgtgcaaaacaaaggaaatattcgatcttcggagtagtatgcatatacgttgagtatacatttggattgttgacatacctaaccatctactttattacatagtccgatctatagaagatgagcagagtggtattgtatgtatgaaaatggagaccaactatgcctaattgagtagttcacaggaacctgtatatatccaagtggaaggttctcttctgactctgctccttcctcgatctcttgttccatgccatcggtcctctccctcctcctcccacctcacttcttcttctatcctccagtcccaatctcgtctcttctcaccttccactacttcctcatctccaaaagttcccttatgtttaccatcatctcgcaagaatctgctcggaatccttttcgttgcatgtaaactcacttggtttccaacgagcctgtttgtcccaaccttcacgcagcgacttcattactttttttttttcgcctttcttctttgctgtttctatctctggttttgtttctgttttactttaatctcttccagttgacaacatgtctaccctaagcggaccttcaacacttggtcgaatggggaatgggggatgttttacctccaatgataccattgatgtgcgaaatctttcttttggacacgattcctcggtatgcttctcgggagacagctttgaatcgattctccagcatgctaatcacattggtcgcgacagaaccctcagaactcgattgctcattacggttcttccgatacggctgaaacatcccggcatggaatgttgcagtccttgtctggtgaaggggctgagcactcgtcgagcaaggtatgtgtttcctctggtgttgactcatgcgtttgggtgtctgtgatctcacaatcctagaagcagaagctagatcatatcaaagttgaacctttgaacggacaaacatcggatcttgacagaatactggccaagatttcccccaaaacacaacccctttcacattctgaaaccgatcgctcttctgtttcgtcccagatcactccagttacaacggtgtcaactttaaccctcaacaaagcccccaatccttgcccccaggaagacagaacggtggagctccttcgtcttaggcaggaactccttgctgcaaattccaagattgctctgcaggagcaggagcttgcccaaacccgtgtgataaaacataccttggatcaagcccttggtccgtcatcagaggctgatttcggcagccgcgaaattacagagcagaccattagtcacctgcagaatgcatttaatgcatcgagctctgcattctctcactttcaagatgcatggagtgcccaagacgattcgcagtctgatgtctcggatccattgtctacaggagcttacaatagatctcgcgcactctgggcccagaatgaggctgccacagacagagaatatggagatagcctttcaggcaccagcagctcgacaagccaggagccaaatcggttctggggagtctccaatgtgtatcctccgtttcccggcccaccatctctacaatcgcaaagaccacactcggggtcctcagctagtccatgtggattctactcacgtcccattggtgaacagatgttgtgtccttcaggacccataactggggctcgtcgctgtatcactcaaaacagtaggggtggatctctattcccaattcagtctactccttggggtgaatttgcttctgggtcctccagtgagcataccgtcaagtcacctgcttcgccgaagagaccccctagcgcctttcagcagatcgggctttactctgtgccctcttacccccctcgaccgattggcagccccctttcacctactgctaccgagtttacgggcaccaacacgaatgaaaccacatggaccaactcggtaagagataaccatgtgcatcgtgtttacattcattctaactcttgtcagatgagcggcaattccatccagacgtacgtgtccccactcgagccactcaactatcgacgcctgctcgacaagaatgtgtcgtgtgattggaagtacattgtagacaagatcatctgtaacaatgaccaacaagcttcaattttcttacagcaaaagctcaaggtcggcacaactgagcaaaaatatgacattatcgagtcaattgtgcaccaagcctacccactcatggttaaccgctttggaaacttcctcatacaacgctgctttgaacatggaactccggagcaagtcgtcgctatcgcgaatgcaatcagaggaaatacgctgaacctcagcatggatgcatttggctgccatgtcgtccaaaaggcgtttgactgtgtttcagaagagcataaagctatcatggtacatgaacttcttcgcagaattcctgagacggtggtccatcgatatgcgtgccacgtttggcagaaactcttcgagctccggtggagtggtgagcctccgcaggtgatggccaaagtaaatgacgcactacgtggaatgtggcacgaggttgctcttggagagacaggaagtctggtcgtccaaaatatctttgagaactgtgtggaggaggaaaaggtgagactccccgtcagataccatacgcatcaagccccttgttttcgctgtcctacttctctgttggtcctttatattgattatgccaatgctaatctattgcagcgaccggcaatcgaagaagtactggcgaagatcgatgtactcgctcatggtcaattcgggaattggtgcatccaacacatctgcgagcacggtgctccccacgacaagagccgtgctgttgagcatgttcttcgttggtctgtggattacagcatggatcagttcgcgtctaagattatggaaaaatgcctcaagattggcggcacagagtttatggatcattatctctctcgtgtctgcactggccgatctgaccgacctcgcatgccattgatcgacagtaagttgcttaggctttaacgccgtgaaaacgtactaatttttttttagtagcgggtgaccagtatggtaactatctcatccaatggattttgatgaacgccgcacctcatcaacgagagctcgtggcgagccacattcggtaacactccctgacagtctattctactttgagtggtctgaagtctaacctgatttaactaggaaacacatggtctcccttcgtggctctaaatttggctctcgtgtggcaatgctttgctgcaacccgtctcatgctacacgccctggtcctggggctggaatgcaaattggccgtttcaacaatttcaacgaagacaaatttacgaccacgagccaatccggtggtcgttttggccggggacatcaatggggaccccattatgcgccacttcgttgagtctgcctcttaatacttcatgttccctttgatgggcgtgcaaaaaaaaaaaaaaagagcaaaaaaaaaaaaaaaaagagcaaaaaaacaacaacaaccagaatcaacaacgaagaagaaaaagcaccagttaagcatttcatctcctctgctttcaagcagacagtctgtctttgccggtttgcctgactgtgtcttatcaatatctgtcgacccagttcccaattatccaatcatttctgtgtctcaatattgtgagttatcattgcttgccgatttattcatttggcttgctatccccagtggctatcatttcattcagtcttatggattgaagcttggggcgtgtcacgttaaatttctcttcaagaaaaccacattgttattacccaaattctaatcgaatatttaatccatcatgaaccttatgtggatagaatatcatttttagggagcagcacttggagtgtccacttcgtccttttcccatggtttccgtcgccgtggtttctcactggaaatatcgtggccactaagcaccgtgtctgggatgtcctggatcccaggtattggttgtcccgtagtgatgagttccacaatgtgtgcaaatgacgatggataagcaggttcagaacgtgttgaactctcagccccagatgtgcttgggtcggatgccttggagatttgtaagtctgtgttgcccagcccttggggctccgttgtccgcgatgccaaccacgacttgaaggcagaaaagtcaatagccggagtgaggttttcttttctatgctaatattagtacccaacccattttgcgtatatatcctcgacctaccgtgagaaaaagaaacacttcgcttttaggacaaggtcgtcatcccggttcatctccacctcggtggcgggggtgtcggggtgaccaagtattattgagaggccatttgcaaactcgggatccgatatgaaggggtaagaatgtaatctttcaaatatctgagcttgcgaggcctgcgccattgttcgatgaagaatacacacagatatctgagatgcggaggatgcggaggatgcgtggggcaatcttagttgtaagctaactactccgtagccgaggctcgtctgctctagtgcgctcgccaattgtttactctgcaccatttgaccgcatagagccttttctactcacctcgagaaatggtgaaagcgacatggcacttgcgagagaaaaagattggtatatacaaacgcctcacccattccccatgctaacttttggcccttgaacagaacagaaaaatccagggatatcttgcgacgccaaactatgcaatattgagataattccacaccctagaccatgatatccattccacctgacgttgggttgggtgcttcagagtgcagggatgtacttttactttgacaaccggggcagttatgcacgacctcatgggcaaagagatcgcagtcgatacaaaagtggttatgacatgcggtacactcgtagcgactgctcacactcattcccttggtctggttctctgtcatttgccagtgatcctccaaaggcacggacggaaaagaaagaccacaggcaaagcaagcggagcttcgcgaggctcgacgccacggcacctcgacccagttgatcaaggggaatagatgatgatacgatcgtgccaaatgggttgaaaggatcaaagtgagcccacaagatgggcattcggcaggaagactacacactttgctgttgcatcgtgagcaaagatagcctcctcgtgagggctttgaatggcatgcacagagcgagggataggactccactgtacgagaagggaaccccatcatcagcaatgagcctgcagattctttctgtgagtaggcagctgggggtgtagtcacgtccatcatcagctcccggaagtgctgctcattcagtgctactccatatgctgtttcatcaccaccattggtttttgtacaaagttcccggcaaattgcaacctgggctgcgagccccaccatattaaccctaattttgtcgctaatcagggtatctatcgtttggtgaatgtctccaggatcggaggaaaggagggaaccatatataaatagcacttctcgagtgccatggctaggtgtatggctaaattcaccaattagtttcgtttaaatcccccaggtttcatgtagccagtgtaaacacatacaaaagagcaccacgtgccatctccaatccattctgaagactaggcaaacctttcggatcttgtgttttgagggcttgaatggcggtgaggtgttctgttggatttccactcatgtcactgactcggagcgcgagaccatctctcaggccgaggacaccaagctgggagatgggattttgttcaaaaaattccctcacaaattcctgggcatatcggagagtcaacaagtatctcgtgggtcgcaagtccttctcagacatggattgtgaaagatccagaattaggatgagatgtcgaatgataccgcgctgtagtggtgtcgtatctttcaagagcctggatgaccgatacacttcagcaagaatatggggacacggcaaagggaagaaactgacctttttcgtttcccggcctccagaagcccttcaacggtcgagttgatggtaccatctgcaccctccaccagtgtctcccaggttctggatagctcccattctgcgcctccgcgctgctttcttttggctcgcggattatcgccccgagtcacctgtaaatcatcttcgtcttcggttacctcccccacatattcttcgtcggagtcggccatgttcgtaggtaagagtggagagagaaagagagaggatccaagcggaagaccgagaatggtccaagcttccgacggagctccgttggagaatatcctccctatctcctctttcaccgagtcgcaagtcgcaatctcttccaaaccaagcttttttggaatagctccgacgatagccgtagacggttaagctagaaaccccccgatgtggggaagaagatccattcgtgctggcgtagcagttcaagtcctccgtccagtcactgtccgccctacccctcctcttctttctcgcacactacacaaactttctctttcacattctcctcgactccggcctcgactgcctacacccgcggctatattagatctgaatttccctcccattaggcattgttccgccgaagtccgcatgatggcttctcaagagcgagagacacttcctgacgtgtgagtgatgccccccgcttgggctattatgtttctttttttgctgccttttcgtttgccacattcaagtcctccctttctttctggttcgcagcattggaaactgacatgacaatagagctaagcctatcaactaccatgtctcccttttcgacttgcagttcggtggttcatgggaatacaagggcgcattgaagatcgatcttaaagtcacccatgctaccagcgagattgtgctgaactcgaaggagatcgaagtacaaaatgctgagatattgggaaaagatggtacgtgtgggagaatataattagggtgatatagagaggacaaaacttatttcggtcttcttgtcatagggagccaattggccaaagtatccgggatcacctacgacaagcaatcagagcgagtttccctcgctttctcgcaagagattgcgccggcagacgttgtcctttccatcaactttacgggcactatgaacaacgccatggccggtttctaccgctcgaagtataagccggtgggggagccatctaccgacactcctaaggaggatgacttctactacatgctaagcactcaatttgagtcctgcgatgcacgaagggctttcccttgtttcgatgagccaaacttgaaatccaccttcgatttcgagatcgaagttcccaagggacagactgcactgagcaacatgccggttcaatccgaaagagacggaaacaagcctggtttgaagtttgtcacgttcgagaagacgccggttatgagcacctatcttctggcctgggcagttggtgacttcgaatacgtcgaggctatgaccgagcgcaaataccaaggcaagagtattcccgttcgagtctataccacgcggggccttcaggaccaggctcgctttgcactggaatgtgctcaccgcacgattgactatttctcggaagtctttgaaattgaataccccctccccaaagctgatctcctggcagttcacgaatttgtgagtaaccatttattccctatgtgttccaagcttttcatttgagctaaaatgcgagtctctaggccatgggtgccatggagaactggggtcttgtgacctatcgaacgaccgctgttctcttcgatgaagggacgtccgacaaccgctacaagaaccgcattgcttacgttgtagctcacggtcagtccccacatccattcgatctctgcatatgttgatgtcaagatggattcgttatctgactcattttatagagctggctcaccagtggtttggcaaccttgtcaccatggactggtggaatgagttgtggctgaatgagggattcgcaacctgggtcggttggcttgccgttgatcatttctatcctggtgagctttggtcgcttctggcagatgagcctctgacgcagtatctaatgtgcaagcagagtggaatgtctggtctcagtttgtcgtacggaattcccgaggtaatatccattatgctacgactgatattgacgttcttccaggctgaaggtgtgcaacaagcatttcatctcgactcgctccgcgcttcccaccctatcgaagttcccgttaggaacgccctcgaagtcgaccaaattttcgaccatatcagctacctgaagggaagctctgtcattcgcatgcttagtgttcatctcggcagggagactttcttgcgtggagttgcggactatctcaaatctcatgcatatggtagggcgtcaaagaagaagatttcaaggaacatctgctgagtggttataggaaatgcaaccacaaatgacctgtggtccgccctgagcaaagcctccggtcaggacgtgcattctttcatggtaagtaccccttagctctttgtttggctgtctgttggtcagcttgagatctgactgagctgccctagaatccctggattcgcaaaatcggattcccggttgtcaccgtgacagagcagcccggccagatcaccgttagccagaatcgattcttgtctaccggcgatgcgaagccagaggaggatgagacgaaatggtggattcctctcggcatcaaatccggagcagaactagctactgttgacacccgtgctctaaactcgaaatccgacaccatcagcggacttggggagggcactttttacaagatcaacaaggacttgtctgggttctaccgaacgaactacccccccgtgcatctggcaaagctgggccagtcgcttgatctgctgagcaccgaggacaagatcggtttgctgggtgatgcagctgcccttgcagtctctggcgagggcactacgcccgctttgttgactcttctggaaggattcaaggaggaacaaaattatctgtgagaaacttcgccttatggtcctttggtatcatttctaatctctcatcttgcagtgtttggtcccaaatctctgcatctctggggaacctccggtcggttttctcacaaaacgagaaagtggccaacggattgaagcaatttacccttcaactggcttccccagccgcagaacggattggctgggagttcaaacctgatgaggactatctcattgtccagcttcggaagctacttattgcaatggcctgtaatgcgggtcatgaagggtgagctatttttcatcgtgtccggatgttgttgaacgctctctaatacagtctcattatcttatagatttgtttcagaggccaagcgccgttttgatctctgggcgaccaaaaaagacatcagtgccatccatactaatctacggtcagtgattttcagcgtgaatgtgtccgtgggcggccgcaaggaatacgatgccgttaaggaagagtatatccagacagactctgtggatggcaaagagatttgcctgtccgcactgggacgcacaaaagatgctgctctggtgaaggactacttggacttcgtgttttcagataaggtggctgtccaagacatccacagcggtgctgtatctctggccgccaactcgaaggttcggcatttgctatggcagtacatcaaggacaactggactgttgtcgaaacacgattgtcatataacaatgttgtgtttgagcgctttgtccgtatgggtctatcaaagtttgccgaccaccagaccaatgatgacattgcggccttcttcaaggacaaggaaacgggggcctatgagcgtgcgctcgtgattgtctcggataacattcgaaccaatgcatcctataaggagcgtgaggaggcgttggttcttgaatggctgctggcacatggttacgcataaatgtgcatctacaaacatggtggctttatgattttcaacaataaatgtgttcaactggactctttctttgattttgatacagtgtcaaaggggattttagattcttcaggtcattggtccacgaggctgggtttatgcacgggatatcagttgagcaggtgatctccaggaaatggaaatcaaaataaaaaaactatccttgtgatagatatatcggtagaaggagaactaaaatcaagaagggacctctatagaagatatagaaaacaccgaaagaatagaaaatccgagaagtggtcgtgacgtgaaacaaagctgcgcatcaggtgcatctggctccctgcacctcctatcatttcaggcgactgttccatcattgtcccctcccccgacttcttaggaacttcgactccatcaactctttttttttccttcccttatattcctctggacttgtgtgtgctctatctctgcttttattccaccttcttatccacctcccagatctcatcatgaatcccgagtggtaagccttccccatctcatccatcccccaagttcccttctaactatgcgccctactttggtcgactatacaagtctgcctctgtgttgaatttgactgatgtgattttgatttctagagtattgttccgtcgttgatttgaccgtcacacgacccaaatcccctaacttgccgatctccgttgcctaatcatcgagatagatacgattaccttttcaagctgctcctcatcggtgattccggtgttggaaagtcttgcttgctgcttcgttttgccgatgatacctacaccgaaagctacatctcgacaatcggcgttgacttcgtacgtctcggaagctgcagggtatttggctgcaagagaatagtggtgctgacaggggattatagaaaatccgcacaatcgaactcgacggcaaaaccgtgaagcttcagatcgtacggctagattgaacaccgaacatttgaagcaaagctaataatgcatacagtgggataccgccggccaggagcgattccgtaccatcacatcttcttactaccggggcgctcatggtatttgcgtggtttacgatgtcaccgacatggattccttcaacaacgtgaagcagtggctccaggagattgaccggtacgctaccgagggtgttaacaagctgctcgttggaaacaagagcgatatggaggacaagaaggtcgtggaatacaccgttgccaaggtatgtttaaagacagacttcaaggccgttgggatagactagtaacatgtcttgattgcacttttacaggagttcgccgatagcctcggaattcctttcctcgaaacctcggccaagaacgcgtcgaatgttgagcaggcattcttgacaatggcacggcagatcaaggaacgcatgggaacggccactgtcaacaacaagccgactgtgcaggttggtcagggacagggtgtccagtctggatcagcaggtggctgctgctaaacggcacgatgttctctttgtgcggtgcggtgcttcaaattggcgcaatgttacatcatgaattgaggggtctcaagcggcgtggtatctaatcgacagaagtcaggcttgtcaggcctttggaaactcggcatgttcctgatgtgcaaggagacgattctccacagagctggcagtcgttatgatgatgccgctgggggttcttctctgccttgggttcgctttagactgcctgcgttctatcctcgttactgcgtttgctcgtgcgattaccgccggtttctgcgttctcatgatttcctggccacgtctctgctctattaccttggcccgtcattctctctgtgtctccccccttccccctttcctcttcacctttctattttctattttcgctttttttttctgtaggttggatttcccacttgtgaatggactaatagcgagaaccttgcgacttctcgaggcataatgcctcacatggggctactttttctattattttccggtaaaccagtgcattgtactgtgcaaaaccttatcgagttaaaatataacgttttagatacattgcgaaggcatgtatgaagatgtatgatcacatgcaagtcacaggcactgactctaaaataacctatgtacttgatttcctctgccacttcttggctttccatttccgtcttagtgctcagtccttgccgctttttgctcactgagtagaactgagcacgccccttagtattacataatcaccacgctcgctcactgagcatcacctgatcgttatataagctggatgactcgctcactgagcgtcacctgagcgctctgatttgctcactaagtagcctgatcttactcactgagcttgacctgagcgctctgactagctcactaagcacgacctgattattatataagctcaagactttgctcaccggagcgaagcgtagggagcagctaagtcagcagctcacctcaataaaatgcaccacgctagccccatccaaatgcagttgttcacaaggactcttgaccgttgtcccctcaacaaaaggctggcgtcatcaatttggcggtcgatcctggttatttcgcctccagctaagaggcaaattgatagtggggctacattcattggttttactattctgcggctatactactattcaactcgccgagtctcgcattctacaataccgtctctatatagttgcggaaaatatccagccctcaatttttggttctataatatctaggaatatctcagaaaaccccaattgagtggcttataaatctagtttagtgtttaattcttattttttaattcttttgtattttgcttgaataacactggtttatcgctcttgttgcctgcccgcttgctcctaggaataccacttcagctctagcgacctaggtatccgcaaaaatattctagactaatcgattatgtctactggggtgatctagctgcctataacgaaatttgagtccccttatttgtctaacgtactctaacgtatttaaactagcaatcagaaaataacttatcctagctgaagtccgagaggacttcctaggagctctagaccttttcgtgccaccgcaaacccaaactatcaaataccattggggccccagtgttgggtccgggtccgggtccgatatctcgacccaaccccgggttgtgcgacagactaaaccttcgtccgtttcctatcataattttacgatttgtataccattacttactaccgaggacggcagccaccttcaggagggggcacctatcaggctatggctggtcatatgacctgagccgtatattatcattagactagacattataatatcattatctttccaccagctataggctttcacgcaacagcaatagaggaaataatatcaaaagcaaaagccacaaccacgccgggtcgacagagacgatccgctccttggataagaataagagcccggatctagctagacaattgaaaacaagatgacataaagcaacgaacttctctcagcgcgaactgtctagccaaatgatcatgtgcaaagcagatgcaaatgcattcaagcctgcatagctgactcccacaacctgggaatctggtccgggaaccctctgtttggacctcagatctttgacggagatttggccttgcaagatatcggatcgctcccagagtgctggtacacgctcagaaacatttgaaatcgtcgccccggtccaatagtccaccgtagttcgccagtcttcgccggccaaatcaatcttaaccaacggacggaagtcaacatccttgaaaatcaaaatgaccccatctgggccagcatagtccaacgcatacttgagtgaggaagtagcgtataaaccgggtccgaactcgttctgaagcgtgtatgaagagacgaggggcgcgaagagtgaggctaggctgactattgacggacgtgataagcccttgtaaagaagattgccgccaagtgaattgatgaatgtattcatcaaatcaacgtaattttcatcacggttgttcttctttcccttcagttttgtcttaatgcaagaaatagttggcggaaaagattggaggcgcgcaaaggggaagacatcttgaatcctgttttgagtaggagttgttgtgagatttgggggaataaagctggcataagaaagcgcggaagcctggcgtcggacaggttcttcatagatcttgtccatgaatgttgctggtatcttcccttcttcaaacaaaattgaaacaatccaaagacgcggagaaccctgtgggatcgaacggtactcatctgtaagaacatatgcgggatcgcgaatgagctcttcgagctcttccaccccctcaagccaaaaaaggcttgacaacggtccgatgaacaaggagacctgctcgccatcctcatatagatactgtgatatctcttctggaatgacaccggggaattcaattcctgcagcccaaacaggttggtagtcggttgcgtacagatctagtatatctctctcgtctctcattgtgaaggtattttggtcacttcgagtttgagatggagttggtggcgaacggcaagagctcttcgaggtggagtcgttatcactggtcaatgacggtggggttttggaatgtgggacgcctggttcggtctcggctagcggcagtggtggtacagcaataggaagactgatactagacgcaactgtaccaggggaaaactcccgctttctctttgaacttcgagcttccattgtcaagtaacagaaaggtgaggttgtcaaggaaaaaaaaaaaccttggaagaacagaaatggaaagagttgttgtggtggacggaattacggttatgaaaggttaccagcgaaattttgctggattacatgtattataccagaacctgtcaggtgacctaatagtatactcccgataagcaaaaacatacacgtgacgtaattagcgtgttgcattttattgatggtgcttactcaggccgctcatgcctacgccccgcaaaaagggcgggttttggtcactgtattcgagcccgcagcttttgcgggctaggtagtagtctcgagtacagcgaccatcgaagccttttgggcagtagaaaagcatcgttactttcaacagaatgactaaatcggtctcctgggccaggtcgtttgggtatactctgaattagactaagtgctcattagaggactctgagcggtctctgagtaatcagcgagcatccaatcagactcactgagtgctcagtgagcgttcattggatctcactgttgagtcacgtgaatatatctgagcagctcactgagtcggagcgcggactgaaatctactcagtgagcctggctctgagcgccctcataaaagcggcggcagctaagataggaaaaccccacccggcagaggaaatcaagtacgtatagctacctacgtacttgatttcctctgccacttcttggcgttcccttaccgttttattgctcactgagtaaaaccgagcatgctcccgagcggtctgatccgcttaactaccgtgtagctacctaggtagtccggggatattcccaattccggtttattacctcggtagttagaacgtgacacactcaagtcacttgattagcatgcaggtaccgagttcgtcaataaataaatcaaatcaaatcaaacccatcaactaaataagcttgtgcaaggtgaatctgcgctatggggcgtctcggaatgcagtggagttggggaggagccgaggcacacagtacttcggcaaaacgtcatgaacatccatcccatccccggtggtcttaagttctaaacgttcttcacctcctgacacattccatcttcttctgctctttataggttctacgttacacctgaaaataggtcaataggccaagctcttcccatcatgtctcaaccaggagccgagcagagcaaggcagcatctgctgctgttcaacagagtgataacatcgcgcacgcgctggcgggtgcaggagggggtgttctgtcgatggtcttgacgtatgcttcccgcattttccccatcgctgctgctaaccccatatccattctagataccctctgatcactctgtcgacgcgagcccaagtcgagtcgaagcgtgcgcactcaaccacccttgatgccatacgccgcatcgtacagagggaaggtatatctggactatattccggcctggaatcagcgttgtttggaatcagcgtcaccaattttgtgtattactattggtatgaattcacgcgttcggcctttgagaaggccgccatcaagggaggccgagcttcgaaaaagctcacaacggtggagtctatgattgcgggggctattgcagggagtgccacggtgctgattaccaacccaatctgggtcatcaacactcgcatgactgcccgcaagtccgaggcggaggcaacattgcctggtgccaagaaaacgaaggcatccaccttcagcaccctcatagacctgctccggcaggagggccccaaggctctatttgcaggcgtcctcccggcgttgatcctggtgatcaacccaattctgcaatacactattttcgagcaactgaaaaatatagtggagcgccgccggcgtatgacgccgaaggatgcgttctacttgggcgcactgggaaaaatcttggccaccagcctcacctacccatacatcaccatcaagagccgagcgcatgtggccagcagggatggccccaaggagagcttgaacggaagcctgaagaggatcattcaggaagaaggctggaagggactttacaagggtaaacattctttggaagtcatactggatgttcactaacatatcctcaaaggtattggaccgaaggtcacccagagcgccatcactgctgcattcctttttgcattcaaggatgtgctgtatgatctgatggtgtctgcccgtagaagaggtcgcatcgctaaatagacaggaaatggctccaagcctaccggacctatgtgacaactcatacagccacacttcatggggagacaaggtccggaccctcactgtccactatgtatacttgttcgagtacgaggaattcgagcgggcggctttcacttcactttctcactataaagaatgacttggtgaaggttcttgaagttattggagctccaaggagcccttctaaagcgatacccaggtactcaaatatgtagtttagttatttatttgaaattcactcttatactcctttaattaaagaatccatttggacctgaccgccttatctttgattcaccgcccatcatcgcctatacccgcgttatcgcgttctcgacgcgattctgctcaatttctccacactttctcctgtatcttgtgcactctggttttcagttctggcattgattcatctgcccctctgcctctctgtgcctcaatatttctttgagcttctacacgtatctctcccaggtgtgcttctcccggtcgtttaggtggaaaactcctaatgctttgacagtccaagcttgcctctccatcgtcgcatcatcacattatctttgtgaccctcgtaccactagttagaactatctgcgctcgctacggatattgtctatcccacctattcgaaaccaatatcttgcgcgactgttttgcctaagctctaatagagctagctgtcaaggctataccggaacaattaatttcccaccaaagccatccaaagacataggcttctttcttttaaaggaaggaacagaaacacacccgaggaatcggctagttggaaggcaacaacggaaacctcgcgtttagtgtgaacaaagtgagagccggggccgatgttatgtctttctcactttgccatcgtccgacaccagacgtgagccagccaaaattcatatcaatcaagtcgttcatgtgagagctttcttctttcttttcacattcatacctgacgcttttcttccctttctagcctagaacatcagttgtgcttctaaaatgtctcacggcttttccagtcttaatggccagggtatagttcctgcattccctggtctgtcagcccgaagcatcccagaagatccagatatccaacgcgagactctgcgattgctagtgcagtattctagggtctcttctctaccggagaatccgtccactccggccacctctggtaatacgagagacgaggtcagagatgtctggcagagtccgcggactgaagtccaacctagtgagggctcacctcttcaaatatcacctcgactcatgggttcatcaagtggcagccatgccactcaaccttctccttcccactctatcgctccttcctctggcagtccaattcgggtttcccctcgcacttcttcgcgcgcttcttcccgcgcttcttcccgcgcttcctcccacgctccttccagggctccttcccgacttccatctccccagtctgtttctgtctctatcccttcctcacatggcatctctccaagtcaccgggagcgccaacggactcttagggaaagtgtggcaatctcaaatgccagtaggaacgatgagataactgcacccatgccaaagcagcatttctcttactcacagggtgtcatgtcatctgcctccagatcccctcactcccggtcaatatcgccaacctccgagcaaaattttattcgtcgttctagccgaaatagagccaaaccgattaattattacgccaatccttgggtcaatgttcccgttgaatctgaagagccagacattaatgtcgaagctattccggacacagtcgcgtcttctccacaggagccgcgtcgcgttttaccccgtcgtccaaatgtccaaaagctgctgtatagccgtgagcttggaggcggaaatcatcgccccattctcgccgatgtggtctcagatctgagaccatggaaatcatggcaaggcgcttcgggcgatctgcttgttctggcttggtcgcctgatggtactcagtttgcggcaggcgccgcagctaaatcagatgaacataatatgcagtacaacaagacgaacaatctccttttaggtgatcttcaaagcaatcgtctaagggaaattccagaccattggattccacgccccacaacttcgacagttgatgacccacggctgtttatgagtgtcaataatatgcagtggattggcaaccgactctacaccgctagttttgacaaaactgtcaagatttgggacgtggaatcaatctgcaacgtatcctgcactcataccttgcagcatgattcccgggtggcagtgatgtccgtctcgagattcgatccggatatattggctacagggactgaatcaattttggtctgggacacacgagatcccgaaaatatgacatcgactctccttcccatcgaccgcgatgcacggtataagcccaactttgagttctcatcgacggccctggcctgggggcatactccgtcgactaaggaattcttagccggaggtctggccgaaataggggaggatccagtatacaaaggtcacctagggttatggcgagctcgcgaatctgcgtttgagaccatcaagatggcttccaactcactaaatgtctttgacatcaaatggcactcttcgttgcccttttttgcaacggccagccctgaggatcctcacaacgcacgcatgaaaggtattggcattaccacgaaatcaatagtgagggtgtttagcctcaattgtgacctccaaaagcgcgtgccgtccgtgctggaattctcctgcccggccttagatatcaacgaggtcagtttctgtccaatgggttcaaacagcacatatgtcaccgctagttgcacggatggaaaaacctatgtttgggataatcggaggggcgatagaattcttcacgaacttcgccataactctccccttaacccgatggatcaccaacgaagccgggaaacggcagacgtgggcgtcagggtagctctgtggggttcgtctatggaccaattctacaccggtgcgtccgatggtgttctcaaacgatgggatattcgccggtcaccagaagatgtcctcgtcgaggatgtcgcatcttttgatgaggagatcatgtgcgcatctttcaccgatgatcaatctcaactcctcgtcggggggtctggagggggcgtgcacgtgctctcatcgggaccttattcggatcctaacataggaactttccagttcgaacatgccccagaacccgaagagcatagtgttagtggtatcgttgcgggaaatcagcttgtctcatccggccaggttgtaaagcacgaaacatttgggatgggtcaagggccctcttacacggggccttttgctatgtgggctaggaacgcaaaaaaaaacgtttctcttggtcgaattggggatcttcctttgctcaaaagatatcagagccaacaattggatggaccaccgcctgaagatcgtcacgaactcgatttgaatcagcgacaagaggtcgaaagacaaatacaaattgccgaaatacgaaatcgaggattccataagagaaaacgccaggagccttctatgatcgtctttcaaggccctatatatttgtcttcccttggctcttctcggccggggaagaagaggaagaaaaaagccgagagaatggatgtgaaaagggaaggaaatcaagagggaaatggagcagacaacagagaagataaagcgaaaaagaaatctcggacgaaaaagaaggctcgcaggttcgcgtctcggataattagcaacacagaatatgtcgaccttactctcctggattcagacacggagatggagacgtcaaaccgacatcggttcaacctcgaggaactacttgaggctcttgaagaagataactggttcccggctagtggggaaatcgatcctaacttccaaaaggagatcgtctaatgtggcagctttcttgatattgttgatgtgttttgcatagcattgaagcgtggagttcagatttggttgttttaaataaattcacgttgcagcgaacgggtttatcaatgatgtttgtgtatgtatgatcgataggctgcaatctcgaatgtggtagcctgtagatatacaatgatgttactatatatataactatagttaactatcagggtccatgccacgtgatccggatgacgcgtaatggatccaaaagcatacgaagacggaacaaggcacattttcttattatagaaaacaggaggttggaatagtagaaaataagaagaataatgcatggtagagattgctatgcaataggaataatcatacataggcgcatgcggatactttcgaggtacttcctcaacccttatcaacttcgtatccagtatatgggcgacggatcggaccactacgacaaaactaattttctgccgagcagaaaattagtcagctagccatacgctgttccacagctgtaatgagtatacaacaatttatattttctctaattactcactttccaacggtcgcattaagtttaaatttgaaggtctaattaattaaaatgcccctctctaaaagagttataaatttcaaactaattacaactattagaagctaataagtaagtatacctaagtaagtaagtatagagtaagcaagtaagtgtttcgggaggaaaatgtcttcctggaccgccttcctattaaatatactgccgactaggagtttcaaatcggtagaactagcagaattctaaaaggcggtaaattctagtatagggcattaagatagaggaatagaaccttatagcatcgataactaagcaattttataaatactaagactattttatacctagtagattattctaggtcatataacctccccgtataccaccatcttctcctccttacgcaaattgatattttccaaagtatacgtattctttatatagtacactctcctctcttaaatatggtactaccattatagagagaggtaatctactctttaaaaggtttaaggttaattgatagacgtatactagaggtaaatgtaaagaggttgcaatattacatacaggcctaagacaataatcatataggcggtgattagagcggtgagccaaaaattagttttgtcgtagtggtccgatccgtcgcccataccagtaatgtaagtggcgatacaaatcaaattgcatctctcgcgttgcaatttattatggggacatatctcaaacttatatttccccaacaattcctttgtctaccatatacctagtcatcatcactaggtacattcacatatcgcttggctccgccgaaaacgtgtgtgtttctatactcgacgctcattcgcccaaagagattcgtcatcgacaaaccggcgaaccaacccgccctttttcctccattaattagtgaagcggacacatatcctcaccggaaaccattgagcggaattgcctcaccgcagctgcttcctcgcccttctcgggtaagtgacaccaagtgcgggttcttgtcgggggggggggtcggcgaattgacgttctctgaaggtagtctagacgttccgggtcgcgcaaaatggctacaactacagtaaccggtcatgggcgacgcgcctccatacgccaggccgaattgcaaattccaaccaaatcctccgttccccaatcaacgagcagtccgatagacaaatttccgccgtacgaagacaccctcgacgccgtcgcggggtcaactcggccaacccgaagcgcctcggtgaaatataccccgagcgaggtctgggaaccgcgaaaagcaaccttctactcacgagagtatgggaacggatcattgcgaaatcccaaacatcgcccacgaaagagcatcagcgaagccatcacgacgatcagaacacgcaatggcagtatgagtgccagtgctcatgaattggccgaagtacttcgcgccccagtctcttaccgactcattgtatgttgattcgcgtttcgagatgagaaatttgcaaaggaaaacctccttcaatcaggccgctcgctaacacactgtctctcaagggtctctgtgtcgtttggtatctgacctctgccctcacaaacacgtcctcgaaatcgatattgaacgctcttccgatgccgatcacattgacgatgattcaatttgcattcgtctccttctggtgtttgctattggtgtatctctccacagttatacctcggttgcgacaaagtatcccaatcctccaacatggaattcgctacccatctcgcgacgtgatttccacagcattgcccctggcagtatttcaattggccggtcacattctgagctctatggccactgcacaaatccctgtatctctagtccacactatcaagggcctttcacctctctttacggttctagcataccggatcctgtttcgcattcgatacgcccgggcaacctatttatcgctgatccctctgactctgggtgtaatgcttgcatgctcgaccggagtgtctacaaatttcttcggtatcttctgcgcatttggtgcagctatcgtgtttgtctcgcagaacatattctcgaagaagctattcaacgaggtagaccgtgcagaatcagatctacaaaccccggggcagcgaaagttggataaactcaacttgctttgttattgctccgggctggcttttttcctcactctgcctatttggtttgtcactgagggttacccactagtatctgatttcattcatgatggtgtgatatcgctatcgggtaagcaaggctcattggaccacggtgctctttctatggagtttttgttcaacggagtctcacactttgcccaaaacatcctggcttttgtgttgctgtcaatggtatctcctgtgtcctattcggttgcatcattggtcaaacgtgtgtttgtgattgtggtagcggttctgtggtttgggagctcgaccacctcgattcaagcatttggcattggcctcactttcgtgggcctctacctttacgatcgcaatagccatgatgatgtagctgatcaaagggcaaacacggatcatttccgtgccgaacagtccattcttccaatgaatgtgcggcacccaagcaagccatgggattccaatggttatgccttccccgcggggagggtttttgaaagtgctctcaactcccatgctgcaccaaacaactccaagaaggaagacgatgggcctgggcatgttcgaccaagaggggccagtctttctcgtgcttggttaccaggcaccaaacaagaatccacttggcaggttagtgattctcaagctgcaacttagcatttgtattttattagttcggtgtacaatatcatggtagcgaggtgttgctcggaagagctttgacgtgactatcctcttcccttgctgtgtttatcctgcctaggatacgcagagtatataaatcatgatgtactttggctgcggcatagtcctaattacgaccggaaatctcaccagatgcgatataggaatatcatgagcaaatttagaataaatagaaggatggtatctgaaaatgtacagagtacaaaaattatatatcaggtgaatgtagctaccgttggtaaggaacaaagtcatcattaggcgaacctttgacagctccagctacggtgcaattctgctcttgggacatgctgtagaggaaataggaacagggaaattgcctgcctcctacaataaatgatgcccgttaacaatttaattggagaaaggaaagggagaaagggggtgaaacggtggcttataaggaaacccggagcggaagtttatccgcctaaccgagtcaatcgagccaatccccgcgagtccatttgccgttgtccttccaaggttagtcagcaaagtgatggtcagcacattatgtaactgcagattccgatgcaaagtgctctctgaacttccaaccgtacccaggctctcaccccctcgccctcctccaccttatctcccaccctcacatctctgttctccttctaatgatgcggccgcagctgtttcgtgcggccgcccggtccctccgggttcctaaggtcactccccgggcattcgcgacgacagcccctcgcgcggcccaggtggaactcaccattggtaagtccaatctttatctaatccatctaagttgatcgataactgatagcttgtttctctagatggcaaaaaggtgtcggtagaaggtaaatactgcctcgagataacttattgaaccttcactcacattctctcccaaaagctggctcggctcttatccaggcctgtgagcaggcaggcgcaacggttcccaggtatgacaaaaccccaccagcccgatttgcttgcagtactaacatgcaccagatattgttaccacgagtatgtgcctctgatcgagtctcacacattgtttttgctaacaccagtcccttaagaaaacttttggttgcaggaaattgtatgtgaaattgacaataccccgtgccacgccattgaggcatgtgtacttacagaaactataggtcgtatgtgccttgtcgaagtcgagcgtgccccaaagccggtggcatcatgtgcttggccggtacaacccggtatggtggtgaagacgaactcaccactggttcacaaggcaagagagggtgtcatggagttccttctctccaaccatccgctcgattgtccggtctgcgaccaaggaggagagtgtgatctccaagaccagtcgatgcgttacggtgccgatcgaggtcgattccatgaaaccggtggaaagcgtgccgtggaggataagaacatcggcccactggtcaagacctcaatgaatcggtgcattcattgcactcgttgtgtccgattcatgaatgacgtcgccggtgccccagaactaggaactgccggtcgcggaaacgacatgcagattggaacctacctcgagcagaacctcaattcagaactctcaggcaatatcattgacctttgccctgtcggtgcactaacttcgaagccctatgctttccgtgcacgtccatgggagctcaagcacaccgaatcgatcgacgtccttgatgcccttggctctaacatccggattgatagcagaggcctggaagtgatgcgggttgtcccgcgattgaatgacgatgttaacgaggaatggatcaacgacaagtcgcgattcgcatgcgatgggttgaagacccaacggctcacaacgccactcatccgtcgggagggcaaattcgttcctgccacctgggaacaggctctaacggagatctcatcggcccacaagaagttgcagccacaggccaatgagttcaaggctattgctggacacttggttgatactgagtcgctcgttgccatgaaggacctggcaaacaagcttggctctgacaatcttgccctggatcaacctggaggtggtgcccctattgctcacggtatcgatgtgcgctccaattacctgttcaattccaagatctatggaatcgaggaggcagatgcaatccttttggttgcgacaaaccctcgtcatgaagctgcagttctgaatgcccgtatccgcaagcagtatattagatctgatctcgaggttggacttgtcggcgaggaatttgagagcacatttgacttcaaccatctgggcgctgatgtctcttccttgaaatccgctttgtccggagaatttggcaagaagcttgccggagccaaacggccaatgattatcgtcggtagcgctgctgcagaacaccctgatgctaaagcaatcttcgaggctgtcggtggtttcgttgagaagcatgcgagcaactttattaccccggaatggcagggctacaatgtcctccagcgtgcggcgtctcgggctggtgcctatgaagttggcttcaccacaccatcttcccaggttgctcagactacccccaagatggtctggcttttgggcgcagatgagatcgcccaaagcgagatcccgaaggatgcgtttgtcgtctaccagggacaccacggtgatcgcggtgctcaacttgctgatgttgttctcccgggcgctgcatacaccgagaagtcaggtacatacatcaacacagaaggtcgtgtgcaagttacccgtgctgccacttccctccccggtgcagctcgtgatgactggaagattatccgtgccactagcgaattcctcggcgctcctcttccttatgacgatattgaggctctccgcgaccgcatggaagagatcagccctgtcatgcgtcgctacgacgttgttgagccgacctcggttgtctcgttgagcaaggtccagcttgtggaccaaaataagggatctcaagctactggggctcctttcaagaaggtgattgaagacttcttcttcactgacgctatctccagaaggtgagtaccctggttgttaatcgatttgcattgctaaccctgctttagttcgcccaccatggcccgcgcctccgctgccaaggccactggaaaccctgagaccaatttcatggccgcaggagaaatgtctcctcaggccttgtatggttagatcggggtctatcttgacctcattctgtgtttctctaatgtttgcaggcgtttttattgtaccacatcttaaatttccctcttgatgtactgtttcctttccatcctctgtgtttttccctatcatcttgaacacctctccggttcctgttgacctcttcgccattctccggtgtcgcctgggattaatcggtagtggttaccttgtacataaagactgaacccccaaaatttcgagtccatgggcgtcggagatgatgaatatgtgctacttccgtagttttatgcgtagcagctttgaaatgacagaagaagtgaaattatactaggagaaaatgactcggccaaaaaaaaaaggaatatccggacagggagcagaccagatccatgtatcaaggagtctcctgtgtcgattgggcgcttttctgcacttctgcatataagatggaactatatcttgatcttttgaactactttatctgacttgttccaagtggccagtttagagctcatcatcatccgtctctcccgcagtttcctcggcatcttcgctgggttgggctggagtagtcttaataggcccgccagtccttttagcaaatggcaaatctctttgaggcggcgcggtgtctcttgctggggaaactcgcttcagctgggcagattcatcctgagacgaatcgtcgtctgtcgtgctactgttctgttcgccgtccgaaggatgaggggtcgaatgctcttcgtccgtgtcttgattattgaaggcatctggattggtttttattggatcaatatccatttgttcgaacccatcagagtcgtctgtatcgctcatcttgcgagcacttctctttgctgaatgagatctctcggcggctctatctgactctctgggaatgctagcctgtacctcggagactgttgatacttagtcaagatatccaggtttctctgtttgtgccacctacctttggttgaatccacagtagccgatgccagaagacgttgctggttgcgaattttgagctttttctcgttcaagacctgcacaaaattggccaccagtcgattctcatgctcggtcttcgcatgcatgagctcctcgagctgttcattcaacctatgtatggtatcttcggcaagacgatagcggccggtcaggctggatacttgttgctctagcatctgagctctagccgctgtgattcctgcccattcaaaaagctcgacggcttgttcatcgtcttgcttgagggtaaaagcacccaggcgttgctatattagtgttaatatggctatatatagaatccatcgcgtagaacacgaactgtgatagtctggactcgcttccgtatcgtgatcacaatttccttgtcttcatcagagcctgatatactggccgaagcttcgagaccagtggcccaatccggctcatcaggggcagaacattgtcccagaatgagagagactgttttaacccattcatcatctgatccttggtaattctttgcttgaagatcattcaagcgtgattgtttcactgcgcgacatgagctcatgacttccagatttcattctatgacgacccacccaggctaacatagggtgattccccctcggtagccgtcaggctcagatcgagccgagcagggccggtacatgagacatggacgagtacaaaagacccagtctcgtcagacctgggaaaccgcaagactcgaggatccgttgagacaggagatagcatattgggtgtgttattgcctacggagtaaatgtatggtagtcgttagttaggtactgcaagtcatccaggcaacagagctcaagtggatatgaccaccgtacctatctccacatacggagtacttaaaattaccaatagcggttttttaaattggtcttatagatattacatactataaatacccccaaccggtaaatacatatggcttcaacgtgaatgttctgttaatcacgtggaattcttgttctcatacacgtaatgcactcttcgaagtatgcaggctccaccgaatctccggtaacctgattacctagatacattaccagtacggggcctgtcacgttcttcctctcctccacgaggaatctgaaggtccagccacaaccgacaacacctttctttccccctgtctcctcttcgcttttgcaattgagttcctttggtccagcggccagaatcaagtgtcttggggtgtccctaatgcttaactgtcctcttttaatgaatgtttatggatgaaggcctgccatttatcaggtcgcctagtgaacccgcttggtctcattcggcgaaatcggttctagagcaaggccggcctctattgggctgattattctaactgaactcacttgccactctgcgatcaacagagaagccgtgcttctcacttgcaacctatcttccattcctaccaaccgacgcggaatgacgctcatgttcgcaccccctgaaccctcaccagtgtcgcaaagcactgagtctgccacttaataacaactgcctccggacgcctgtaatcatcccatgaccttcgtgttctccgtacacctttaatcaattcgcttcgctgatcatggaatctttaccaatccacctacgaccgggtaccgacgagcccattgaatgctgggatgatgacgacgacctgcagttcagcgaggatattcaatttcgcaccgcatccagcgctggctccataacgaactcgtcatttcggccctctgggcaccgagattctatttcctctcgacgctctgctcgctcagatattgactctaatgcgggcgatgaagactggcaggtaccgctctacgacaacgatgaatttgcaaaagaagatgctattgcttcggccaagactgcgggcattcccattcctccagatatccccaagtcagctcttattgggggcacgatcaagcggttatcaactcgaaagaccaagcaaacttttgttgacgactggtcagaagacgtcgaggtcccaggtcctgaaaccctgttacatctcagaactcctcgggaaaccatatttcctgactctcttcgacatttgagctccgctgctactagtccagtgaaattcactgcctcgccatcttgggatgacgaattctcgacgcgtttgcaatctcccttgggaccatttgacaccttccaagacgacaatgatagcccagaagctcgtatcccaactctcaaagccccaactcctcgatctccgaagaaattgaacatcgacgatgtcggcagtggcttcggtgttgaacgggaagcagacgacgacttcaaccaggattttgaacttcccgccaatcatcaacctcttgaattatcccatcgaaaagataatttttacgtttccagtcccactttagaggactttgatcttgagtggtctgaagggagtatcggtgtacgagttggtggtaccgcaagggatggtcgttcagttcctagttcttctatctctatcgccagccccagcgtttcaagctgtctcaccgcagaaagtgaagacgatggcctggacggtatcgtcatccccgaaggtccccttgatttcaatgcttctctgcaaaagcgacaggctgcgcaagctgagaatatcgaagcggaagagagtcaggtgggccatgtttgttctgacgccgacgacttcttctctggccttgatatcgacaatgagaaggcattttcctttggaaaacctgctctgaatcccaacataaagtgcaaaacagaacggccatccagcccgactcgtcgatctgcaacaacactcacgttcaccagtgcggcaggatctccacggactcgtattccacgcttgtctggtcatgatcggacccattcaacccaccttgagactgtgtccgaaagtggggcgcctctttccaaatttcgaacatcacaatcgcgtctagggcattcgtctcaatcgtcaacttcaagtctcccagcccctatcgttaatccatcaccagcccctacactctctgctcgatggcttcttgggtctcgcaatttccgggacgttgccccggcccctgagggtaacccatcagttaggcgtttaaagaccaagcgatccctgccatcgattcgtggcttaagctcgaccgcttcagtggccgcttcccagcgaccaccggtcgatcgtccagtccgccttccctcgaccagacctaaaacaccggttgatcaccccgcaactgatgcgaggtcgctgagtcgcaggccacaggtaccatttatgccggctggtgtatcggaatcccaatcacatcatgtcagtgtgaaggggtatcgctcgtcacgtcgcacaaattcagatagctccggcgggcttcttagtccgcagagcacggcttctcgactctcccggccaactcgcaatgagccgttccgtgctgggtttagcgacacaagcgcaaactctctcggttcctctacaaaacgtacaatcacacgacccactaaaagacgcaatttcggggacggaacggagttagagtcatttgatgacctatctacatcggtcttggcagagagcaggttcgtcaaaacccccactggtcgaggtgctccaaggttggtccgcgccagactcagccagagccggattgatctgccacgtgatgaatcacctactcaatctttaacgtccccaccaaactccaaattgcgcagtccgacccctaggtttgcgcgagatacaaatgcatccagaaatgcgagggaacaacgcattgcatccatggctattaattcgaaaggccgtgaaccaaatgctctttcgacgttcaactcaaactggaagtcccaacctgtctcaaggattcctccggcctctgcgacggttagaagccggaaaggtaaaccgaatgccagaccaacgtccaagccacacttgatcaagcccatgggatccggggtgcaggatgccaaatgtaagcaagacctctgatctctatttacacgatttgcgcaatcttattaaccgttttcagccgtgaggggtatgcgttacaatcctaccaatttccggtgggaagggaacgaaaatctagttcaagaatttgatgtcgctgctcccaaatcacccaaacctgcaccggctctcatcgccaatgttggcgcgatgcagaatgtccagaccgttggtggcatggtcttcgatccacatcgtatgtgttggctcagggcgtctcttggagctggtgcagacgaagacgacgtgtttgctggtttggacgacttggatgacaaaattaccagcagcaccatcaatggacgaaattccggagccattgaggagcaatttccagcagttggggatgacgcaagtgccggtgaatcctctgatgaaggacctatgaccgaggaatttgatgtcggcccagaattcattcgacgacagcgggcggaggaagataagtggagacgcaaggttgacaaatgggttggattcgaccgaggcgatcacgaccatgaaaatcattgggaatggatcatccgcgatttagtggcttttgaccaccatcggggatcagcatagaagcacgccagatttgacgtctgcatatccacagagctttcccggacaggggtcgccttcttttacccgcatgtgtccatgtactaacccaaccccccaatacacgaacttacgacttgaagacccccatcgattggccgtgacgattcggccgatgtcatgaatttatggttttctcctttttcccgggcatatctgcccatatctgaccaaggtctgaccacgggggcagatatgctatgtaactatatcttttgttttgagtacatacagtttaatatctttttcttggagaggaggctattgtccttctgagcagtctatgcctatctgttgtatattattttgaacattcggactcgataccaacacagcgctctgttttctcaaaaacaaatatatataatcggaaagcagcagagtacatctgtcacaccagatatgttttggactgtctgcaagtctgcaggtctgcgagggtccgaaccttgaagcagtccgatgtgtctcaccttccaaccaaacgtatgtcatcctgttgtcccgccttggtacttctccgtacttctccgtgtacttttctttttccctttacatccacaaccctgcaaaagtcccttctccaagtggacttggtgaatggccacgtcaaatcgaagcctctttctcggatactcacttgcatctcttcccatttgggaattctcccccccaaaaaaaatcaaataaacaatacggtgggacaacatagcccagacacagtacaacattgacatgacagggattgccagcccatagaagacttcaaatctcgagggcccgattcatcacaattgccctagagcacttgtttgtacatcgatgtacacccattgacgatgacccccctcccgttttctctcttttcttccccgcgctctctccctgtcccctcttctcaccgaatgaacccaatggggaggagcttgagggtgcagaacttcctatagtggggattctcaatccatgttccttaccaatttgcacggctacttgcatggacagagataccttttgccgggggtatctcctgccgactttgtttgcgaagcaaacgtgcagaaacaaagagagtttcccccctttcctgattcgaatcgggaagatcctcctacgcgggagtagagttgttccgcaggtctaagtataggaaattcggggagatgatcttcgcccccccgctgtacttcggccaaatcaggagagccgaatgggtttccccccccccccccccaccnnnnnnnnnnnnnnnnnnnnnnnnnnnnnnnnnnnnnnnnnnnnnnnnnnnnnnnnnnnnnnnnnnnnnnnnnnnnnnnnnnnnnnnnnnnnnnnnnnnnnnnnnnnnnnnnnnnnnnnnnnnnnnnnnnnnnnnnnnnnnnnnnnataagggaggccgaaggggtttcccccccccccccaaagtcagcacaatctccgatagggtgcctcgaatagcctgtccactcccatatcctcaacgtggcttcttgaatggtggcgctgattgacctcagggcatcgaaaggcaggaatccgtatcaccattccttctgtgcgctgtcgtatcagcctgcttccacttttcgataccttcggcgggtcggacagaattgaccacgaaccccagtcctttctcactgcttttcttttcttttttcgttagatccatgccgctatcttccctgcaagctttgctaatatgcttccgtaccttacagagctctgttcgactcgcctggctccatcatttctttttctctgtggaatatttgctgttcgtcttccagggatgccctctgttgtctctgcccactatctctgtcgcgacatggtctcgtgcacttcatcttgggcatcagccatgtcagtcctgcactgtctgtccatcgaggtctttttaatagaattgctaccccgtttccagatgggctttctctgaattattcctctttctctctctctatatctcactttcgcaccgagatattatagacactgttcaattatttttgtgatacttgctgtggtgtaccagggtactgtgccaattcttcttcgactacatgcaaatgagttagccaggtcttcgtttcactatcattatcatcatcaccttcctcggagactcgctgtatactgcctttttttttctctctatattttttttaccccttcttattcttcttcttcttcctctatctgtttgaaggatcaacgtgagccgaacaagaatcaagtggcattccgactcagtgaggtatcgattatgagcagctttgcaaggcgcaacgaagggaatgatgcctacctcatgaatcatcaaatggcaatgcctggctcgtacggtcagcaagagagccatgacttcaacacgcatggatctggttcatatcatttccctcaacattctttcaacccatatgggtctcagtttggccagccctacggtccacagtcgagtctgtctccggggttgcagcatttgcagtatacgtcggaacattcgattccatcgatgacaaccccggatgacccccggctgcaccatccgccgcagttcatgtcccagtcgcgctaccttcaagggccgaggtacctgccccgcgacccgctgggtgaatccgagattgaaagccaggagtctcataacgaggctacgttgctgtcagaggctgtagtgcccgcacttagcggcttccctgatgtaaaggagtttgatcaattgatgcagaagtgggtgattcgtgatcaaccaggatggactcgatgctaatatctcattctagctatgttgaggacctgtccatcaagaagcaagataaagcgttgatctatgctaaaagggcccgtaacatcagaactgtgttgattgaccccaaagacacggcggtggagtctgctcaatttcggtatgggtctctttggttcaatcaattacctgccttgctaaacaaatcaggttttgggtcaaaaagatgttcaagctccaagctgtgggatctgatgtaagtctcgcctgtcccggtacatatgatctcaatcgatgctgacgagtgatttgttgcgatgtaaagcataggaagatgatctgtcacgagggcaagccggttgcgattcgggaaaaattgttcaagatcctcaccaaggctcatcagcaatgccagcatggtggccgagacaagacatctgctcaggtccgacggatatattcatggtgggaaaatccgtgccgtactatatattatgtacataacatgtctgatgtacagccactgactatctcattagggttcccaaggaactgatctcccgcttcgtcaagatctgtccaacctgtcaggtgcgccgtgggggttctcgattgacgccacctaattcgcgaagaagctcccctagactggagatggtctctcgatcccccaaacttccgtcgccgccaatctcgcgacgagaatcgacttttgccggtcaacttccccttgacaggacgcaagcagattattttggtcatttacatggtcatggtggctggctagatagtcatcaaaatgtgcaaagtcgctcgaatctaggtaacggagttcgctcgttccagggttccatgggcaatctttcgcactcaattgctggtaccttggattccttctccgccgacctatccattcctccgtcccaattgagttatacaacgggatatgtcccgcacggggctgcacctcagcgagagtattgattggcctttctggtcgacttgtgtggatgttgctttttgagtattatcagggtacactaagtgtgtgctctctaaaagtataccttgccaggagtctctagatatttttgtgcttccttgtgaacgacaagtctgatgagtggcacacacggacagggcaagaagttgattcccatccgctacggggttttgagtgacgccaatattgaatggagggaagggaggaagggatccggaaaaaaaaaggaagaacatgacaagagggaaaaaaaaacacaaaaatacgctgaataatcgaacgactgaattctgaattttgcattgtacaacagtagaccaacgaccgaaaattacagaagttttggcgagaggacctctttgatcgggatatacaacaatcagatatgcacatggtccgcgatcgtattcgatattcgaatgttcagtagccaattgcgggttaattggagcctcgtgtgaccatttctaaatgcatacagatttggcgacatgaaaacatcaattcatagctcccagcgtcggcgcttgaggggggttgcacgggttcaaggcactcggtgcttgtgagataggcgaccacggtgttccaggcaaatataggaccgagtggatcagattcgaaactccatctccgaacctttagaagatcatcaattcctcaactcattcaaacagtagacaggtttttaaacaggaagcgagaacttcttgcccttcaaaaccctgggagaaaaaagcgcataggtcagtgtccgcatcatacgtctgttttttttgtttctttgagcgaattgagcttacttgttgtagtaaatgtaaaagaaatcggagtaaagcaaagtttggatgattccggcgataatgctcacaggctggaaggaacgttggaaggaggcttcggtaaaatagcggaaaatccagttggggatgtagagtgccctatatagtcccagagcaaacagatagtgggtggtgatggtatccgcttccccggttcgttgcagcatgaataattgtggcaatatagcaaccgactccaaccaaatggaaaaagtccagagtatctacatgacgttagtcccgttctttctacaccgtagacagcatggaaccaacctcggagatgcgataatcgcgcggaaacagaatcgcgagcaccgcgctaattccgaggaggtattgaactttgaaagtatcgatattgggatcatgtgtgggtttgtagtcgttgagcatgaggtagatgacgtaggccgaggaaccgataaacagaagcttgaacgtagtgaggtacagggagtcggtgaacgtccagaaaagatctataaggcgcatgagtgattatgatcaacataaagctgacggtgacgtcgaaacctaccaagataccgagtgacaaaaacgagtaggtatagcacctgcgatttgaacgacaacccggaacaactctgcgacgcgccattagttgcaagtcatatgtggccttatagatagcaaaacatacgcttgacgtcttcatcttctgcagaagcatgaagatcgacgccaaatgggagaagtcggcttcaatcgttagtatatcgcgttggttttccattagttttcatgccatacctaataacctgaagatattcattgtgccgaagacggatctgagttaatagtgaatagtgacctaagccaggagagagagggagaaagaaaatagaggaaaggagagagggagacgagtctgagaattgggagactcgaccaaaatagctgagttgttgacacgaaggcaaaaaatggaaggggaacttcgaattacttgcagatcaggtacaatacgtgtatggtatgggtatgtattacacaggacagcgaggaaggcatggaggtacatggaggtacctcttggcaaggcctttcgaagcggcaaaataagtatatatttgtacctacagcgaggaggcggcatcttaagtatctacactatttccctacatatttatagagcgccgaaatgcataatgtcgtcaagtcgtcatattgatacaatcataatcgctacctagacctgcccaataccttgatagtaaaacgccgagatatattgacgttgtagggcaaacttacatttgcctcgctagaacaagtttccacccccaatgctctcatcggccattcgctggagatgaccttcagctagctcgctcttaagagcacatattgagctttcacgatcgagtcgatcccagtctcgaagttccgctcgcttggacctctgtgtctctgcgatctgctcaagtagtttttctttgtcgacatcaagctgagctaaccgcttctccacagcaggatctagaagcgacggaagactccgaccttccggcatgatagtacatagccccgcaagatggttgatccccctctgagccaatggttgagtcacacatggagtgccgggttgccgggaagttggatgtcggtaactgccacctagtaccggagatgagaaagaagcgcgaggacctgctggtggagcttgcgaaggtgcaacaggcccgcgacgtaccggcggtgaccccgtccaagcttcacgtgggccaggtccgcgacgaggacgagtcggcgcggatagtaaagagacatgcggaggaccacgatgttggtgagatggcggcctaggtccctgataaggtcctgatggcgggagtggaagtgggcttgcactgtgatttttcggttgagtcgggatgttgccaccaaccctggtcccacttgtctgggattctctctctggaatcgaaaaaggcgaaggattgccaattggtgctcggtcctcatgatctgggcgttgctgtgtgtgaaaaggctccgtatcgtaggtctgatcccggtgcggagatcgaccttggggtttcgacgaccgttgcaagggtaccggggagcgaatcggcgaccgactacgagctttttcgggagccacaacaggcttttctatagccgacgatgaaagtcgagatatcagggcgggttgtgaggccaaggcttgtgcaggtgaaacatctcgtttcgccacatcacgagagtggcctcgatgcgatacatgaattgggctctgtggcaacaagccttctggctgtgctctcggagaggaagctcgggggggtttgtcaatattcaagacagcagaaccatctcgtctcgcggatcggaagacttggcttccaggggttgtatcgcgcattcgtctagggctgttgcgagcacgggatgcgttgcgtgatctgccatcactgtagggcgatttcgagcgccatttttggggcggtgatctgatcctgtcatctcttctgggcgagaatcttcttggtggagatcgtcgtctttcgtaggggggtgggccaaagtttctccccggaggagtacgtgagcgtcgccggtatggcggtggtgaccgactccgtacgcgcccgtaccctctatttgctgacggtacccaagtgtcggctcgtggtcgaggagggcttcggtttcgtggtggcgaacgccggtgacgaatttcatacccccgggaaggggaacgaccgtttctctcggcgggacgatagctttctccacctcttcgttcatcaaatctagggaaatacttagaaactttctttcaaaacgtttggatacgccaacgaaccttctgcgatcccagtccattctggcacggagaatatggatattagaggaggtgagatgaggttcaaagtattctgggttctccgtctcctggggagaagggtgaaagtagatagatagtataaggaattgaagggtcgaatcgcggtagatggaaggaccaagctaaaccccttttagaatcagttcccgtgactggggctcgatatatgtacatacataccaaaactacgcaagatgcttggaatactatttatataaatctacaaagtactccccttgaagtcgcatagattaatcaataagaataagaaatttcattcagaactaaccatacattaaaggctagaaactttccttgcaacctagagtatgaaccaaagcagccaaactccaatgctcatcatgaaaagaagcacacccgggaacccctaaagaaaaaaaatagaaaatcacagtaaaagaagcatccttaatgctttccccgtctctcctcttcctttcggaatcttttgcggtgctcctgtgcaatcatatcactcaagtcctcctggaaaccccagttcggtggattctgctgctgcctctgtgactcgtacatgctctggaggctctctttgctgagaccatcgccagattgaattgcatccaagttgacagacacttcaacatctccaggcttcttgcgtttccgactttggtcatctgcaccaagaacaggaggcttgcctgttgttccgctaaggtcatatgccctatcacccccgaaaaagccttccacgttcgtttgtttctcgggtatgacttgataagcactccgagggtgaatagattcctcggtatcggtaccacgatggtgtttgcgcacatcaaactctccggaaacattctcggcgccaacaaattcagatgggactgccgattcgattccactagcggtttccatgccactaggagaatgagcccctgcacccacgccaccttcgtcactttcttcttcttcgtgttcatcgtcgtcctcctcggcttcactctcctcctctgactcctctgattcgtgtaattctccccaaagctctttttcaaccggctctccttgttgggcatgttgttgaggctgtaaaacgccgaagatatcacctccgaatagggggcggttgtgttcatcgacaggtggctttccataacccccaggctgatagccccacgacgcgccgggtggaggcggcgcattgaggccggggatcttcagcgctgggtaggaagacgggggaccatgtcgctgctggttgacaagccacgggggagggcctcccggggtcataccaagagcgtcctttaactcatcgctcaattcaccaggtcggagatgcttgagattggtctcgtattctttgccctcataatagatttcaccgtaacgagtcagttctggcttggtttggaaacggaaaaatgcctcgtaaagcttctggtaatcgatgtccagcttgcccatctttggctgtactctttcccgttgcttctgcttcaaacttgactgctcctgcttctctaaagcggcgtcgcgcatttcagatattcccgtctcctgtatgaattttgggagagcgaacggtgccttctccactccccgtttggatgagagatactctcgtttgagcgaccagtgggagggtaccggaaccacattgcgatgggctttaatgtgaacgaggagtcgaggatcagaggcagatgtatctgtccattccacaatctcaggctttcgtaccattgctttgagttcagcaacggatagcttgttcatttccttccgcttctttttggagatcttgggctcgctatcatgctcttcgtcgggtatttcatcaccatcaaagaagacctcgggtttatcagcctccttcgatgaattgtcgttcactgtctcgtcgaattttccggcaacacctttgtacatttcccatagcggatcggttgggtcaggaagcaggtcagtgttggtatcagctggtgcatcttgagcagtagccactggcgaagatgacagttctcgtgcgatggtgttttcaatggaatttgtagtctttgtagcagtgttagcattgtatcggccacggctgagaggtttcgagggatatatatgtcttacctcggctttctgggcctttttcttggctcttctgagctggttcttgctcaatttcatggtcgctggaaggtttggcaaccgctcaattaacgcggtgccgagaattaacgcggtgccaagcggagaatattccggagagacgtggtactggcagcttggttcaagtgcgtgcaagggataaactcagctagcgaaagacaatggagtgggggacaaggttgaaaacaaaatagttatatggcatctcaattgccatcacgtgcattcacccgatgccttaccgcctatatctttctacactaggtacaaatctcacgtggtcggagaggttttgtcatttgttacgcaattcatgacctagttaactaactatactttattatatagttaatatatgtttagtccagctacttgtatagaatattcagtattgtgctaataacctagtagacactaaaaaaaggtaaaaaaaaaagataatattgtacaaaatggggggaacaagctctatcagcaaagatagcaaataagttcctaaacaatcctcacttaaagcaaaggatctacatagatttgcgaagctgtagttcactagcccagccacatcatagaaacataatccgattatagaatgtatgccagtattgatgtgaatggtgcaatgttgagcttagcagagccctggaagttaagcagacagtctacttcttcttctttgcggatcttgattctgttcgagtcttagattttgatcatgtcaagtaaccattaggtgtaggagcaaattacctgcagcagttcgcttcttcttcggccggcccttccctcgcaatttggcactatgaatcaaatgtttagtaggagtgtatgtgacatgggacaacaattcttacatctgaatagcttcttctctgtcatcttcggcttcgtcaaatgttgtcaatccaagaggcttataagtgttttgtaaatcttggaaagacacagtctgcttaggataccaggctgcaagcgctggtccacgcaaccgctgtctcaagatcttgtttccaagtcgaagccgttgcgggttgaaattaagagagaatatgcggcattgggtctagaggaattgtcagttagtgaatgtcggcacagcgcaatggaaaggtggatgaaccttaactagatccaagatccgacttgacgccattttgctttctcaaaggttcagaacaatcatatgcaagaagaagggtgaagcagctgttcacagcgacttggtagacaggtgtcattgaacttcggtagcaacagaaagtttgaccggtggtcatgtgacctcccgaagtataccgcctacatatcatccatgtttttacctccaggcgcaagaggaaaactagactaagactgaacaggggctacaacagtcgatatgtctcaagccaaagagatagaaaatccagcaatcttaaaaaggccagtggtagatcttaaaagatcatcatctgtctttgggtcagatggcacacaaaactcacaaaagcggcctaaggtgaataccatgttctcatcccactgagcgaattcctgttgattcgagtgaccttctaacatctacttgcataaaggttcaaccatcaagtcggccatcggatactaagtcctcctctattattgtcagtcacagcatgggcaagtccagcaaccattctcgtatacttcttctacaacgccttgttcgagaaatatcaaccgattctgatctcgctggtgttgactcggagattttggatgcaatttcgaggctggatgacacgtttcgtacgacgaagagtcaattgccttccaaagatccttccatagctggtgaggtcccaatatcacgccacccagatcacagtcccaagtcggtcaatggctcgtttggccttgagctcccccctatcatggatcacaagcttgaacttgctgtctttacccatccagctcttagcaacaataaaaacacgacctacgaccgactcgagatcctaggcgatgcatacattgagctgattgcaaccaaactcgtctgggagagatttccagatttaccagcaggtcggatatcacagattcgggagatgcttgttaagaatgagacactttcgggcttcgcagaaagctttggtttggaccgcagggttgctgtgccgccaaactacaacaccccatcaaagcgatggaccaaaacaaaaggcgacgtattcgaagcctacgtcgcggcaatcatactatccgatcctgtctctggctatgaagtagccgagcattggctagcaggtttatgggtgccaattctcaagaacttgggacatcagaaaggggagttacgctccaaggaggctcttgctaagaaaattatggggaaaagagtcaagcttgaatacatagaggagcgtccatcaattcagcagaagggcggtacacaaaatttcttcgtcgcgttatatctcactgggtggggatgggacaaaaggtttctgggttccggtcagggtttgagtaaagcagctgcaggtgacgaagcagcgaaaaagacgttgctgaacacgcctctgattcttgagatcatatcagcgaaagagtcatgggagtctaactcttaaaatcttggtcatatttcacgattgatcgggtcggtttcttcaagttactagatctcgcattccatttcttactcaataaaatagcacccgatgagtccacccttgcactgtgcagcttaaagacgttcctagaaccccattggcttcggcggagaatatgtaaatccgagattgattctccccaaggaatcaatccttctcacctctatccgtctcttgacctctaccagagacggctggggaagccgcgcaagccgaatgatatctatatcatagaatgacgagtatggaatttgtcttcgtcaacgttcagaagccaagtgacgcccttcagctcgccaaagcacccgaggtccgatctcacgtgacgcgttatcaatggaagcaatctgcgcgtcgagacaagcgaacccgaaggatcttgctaggtgttgcacaggatgtgaatggagctggatttcaaaacggcctccggctcgattcttttaaaccggaaccaccgtcgatattgcctcaaataggcggactccgagttgaccctttccagtcatatcctatctcgggtcaaccgtggactccgctgctggtcgatcactgtaagttactttttgaacttgatttaaacaaggtggactttgttaatatggtaagacttgatacacatggcagttgatattcccgagcttgacctacctggaaaccacggcctcttgaggaccacttggtttccattggtgatgaccgagcccgctttattctctgtcattcttcttcttgctgcatcgcattatgcctccctacaggtcgatcctagcagtatgaaaatcgatctcctcggttttcgttatacagctgtactatccatcaatcgcagtcttgatgctcggcagcccgagaatgtacatgacgctttgataggagccatagcaaagatggcaagctatgaggccatgttcggcagtctcgagaattataatatccacatgcagggtctcgcacgactcattagtttacgagggggtcttacttcactaggcttgaatggcttgctccagcggatggtgatttggatcgactgtaatgccgctttcttacatggatcggcaatgtatttccttatggatacctctgtgccgggtgaatctccgccatacccgaatcctggtcaattcctcgggagctcgtgatacccagcagagtctaaatcatttcattgaaccaatcaaaaccccgcatatccatcggtatgatgtcatgatctcatctatcatatatagttcatgcatttcctaaataggatatcacatctaaagcccgccccacatctcttggtggatatgccccacagatttccgatttcagataacacatactaatgcgggatctgggacatatgtactgtatactacatcataggtccagtcgctgaacatataaggaatgaacacctcacggggaaagatcaaatctctatcaatcggcattactcccccagctactccctatcttcaccacaaaaatggctctcactggtaaagtcgcccttatcaccggcggtgtcaagaatcttggagctgcaagtgcccttgaactggctagtgtcggcgccaatcttgctcttcactaccattcgtccagtggcgaaaaggatgcagctgcgctcaaagccacactccaggaaaagaacccttcgatcaaggtttccttctaccagggtgatctcacctctgcagctgcagtgacaaaattgtttgaagatgttattcgtgactttggccatgtcgatattgtggtcaacacagtcgggaaggtgctgaagaagcctatcacggaaatcagcgaggacgaatatgacacaatgttcgcgtaagtctttggagaagaacatcacgagctctctaggcatggttaacaagactttttttctagggtgaactccaaaactgcgttcttcgtcctaaaggaagccgctgctcatgtgaccgatggtggaaagatcatcagcattgtcactgcgctcctaggagcgtttactggctactatacttcttacgccggcagcaaagctcctgtcgagcactttactcggtattttgccagtctagtgtccattcaggtccttggctaacatctatcataggggtgtttgcaaggagcttcagtctcgcaggatcagtgtgaacaatgtcgccccgggaccaatggatacacgtgagtttactactacaaataatcaagggatacgtttcgttcaaacgatctaacgagatgttaccaacagctttcttctatccccaggaatctccagaagctgtggaattccacaaagcaaatggcatgggcaaccgtcttaccatggtagaggacattgctcctatcattcgcttcctctgtactgatggtgcgtggattaccggccagaccattttcgccaatggtggatatactactcgttgattgagtctttaaattctcatggcaaggctcctggtagatcgaattacaattgaatggggttggggagggggcacagccctattgtattttcttcccttccaagcttctctcgatcatataatgcaaagggagaatgtttgttgaatagaaagcctcattatttcttcactgatgataaattataatatgatattttaaaaatgttcctgtgtagtgaatacgcgcggggccgtatagtaacgaataagtggaggactgttttctatggtacgagtagtaggatactagactaaagagtaaaatgagtataattattaggccttgataggtgctgtagtacctggggaattttggtactattatccggtgctgcggcacctagtactacagtacggaggtccatcccaaaagttcttgtctcactcattttcacgctaatataaaactagtcctagtggcggagaggagatcatgtgaccgggtgctctctctactgggtcgaaaaaaatagaaatctagttggtaaaaaagtattcgctaagaaacggtagaaaagatccagccggtagaaaaaaactatctatcttaaccatataaaggacatgcctgggcgcatgtctcttccgcttggccaaaagaccattatgtcagcccttgcgctaatattattagaacctgtcaggaccctagtacaaagaaggctgatacctgaagtatttgtcaggaccccagtactgagaaggctgatacctgaagtatttgacagaaaaacggtagtaaggcgaatgtatatatggtagaaaaatctcaatcaattctctaattctctaaaaatgataatagtccggaaaacatgacaatctgatagacaacttagtaatcaaataaacaaaataaaatgaaaggatgttttttgggcagaaaaccttctaagttcgtttttctatagaaaaaccagcctggttagttatatgacctaactatattagggataaaaaataatagtatttatccnnnnnnnnnnnnnnnnnnnnnnnnnnnnnnnnnnnnnnnnnnnnnnnnnnnnnnnnnnnnnnnnnnnnnnnnnnnnnnnnnnnnnnnnnnnnnnnnnnnnnnnnnnnnnnnnnnnnnnnnnnnnnnnnnnnnnnnnnnnnnnnnnnnnnnnnnnnnnnnnnnnnnnnnnnnnnnnnnnnnnnnnnnnnnnnnnnnnnnnnnnnnnnnnnnnnnnnnnnnnnnnnnnnnnnnnnnnnnnnnnnnnnnnnnnnnnnnnnnnnnnnnnnnnnnnnnnnnnnnnnnnnnnnnnnnnnnnnnnnnnnnnnnnnnnnnnnnnnnnnnnnnnnnnnnnnnnnnnnnnnnnnnnnnnnnnnnnnnnnnnnnnnnnnnnnnnnnnnnnnnnnnnnnnnnnnnnnnnnnnnnnnnnnnnnnnnnnnnnnnnnnnnnnnnnnnnnnnnnnnnnnnnnnnnnnnnnnnnnnnnnnnnnnnnnnnnnnnnnnnnnnnnnnnnnnnnnnnnnnnnnnnnnnnnnnnnnnnnnnnnnnnnnnnnnnnnnnnnnnnnnnnnnnnnnnnnnnnnnnnnnnnnnnnnnnnnnnnnnnnnnnnnnnnnnnnnnnnnnnnnnnnnnnnnnnnnnnnnnnnnnnnnnnnnnnnnnnnnnnnnnnnnnnnnnnnnnnnnnnnnnnnnnnnnnnnnnnnnnnnnnnnnnnnnnnnnnnnnnnnnnnnnnnnnnnnnnnnnnnnnnnnnnnnnnnnnnnnnnnnnnnnnnnnnnnnnnnnnnnnnnnnnnnnnnnnnnnnnnnnnnnnnnnnnnnnnnnnnnnnnnnnnnnnnnnnnnnnnnnnnnnnnnnnnnnnnnnnnnnnnnnnnnnnnnnnnnnnnnnnnnnnnnnnnnnnnnnnnnnnnnnnnnnnnnnnnnnnnnnnnnnnnnnnnnnnnnnnnnnnnnnnnnnnnnnnnnnnnnnnnnnnnnnnnnnnnnnnnnnnnnnnnnnnnnnnnnnnnnnnnnnnnnnnnnnnnnnnnnnnnnnnnnnnnnnnnnnnnnnnnnnnnnnnnnnnnnnnnnnnnnnnnnnnnnnnnnnnnnnnnnnnnnnnnnnnnnnnnnnnnnnnnnnnnnnnnnnnnnnnnnnnnnnnnnnnnnnnnnnnnnnnnnnnnnnnnnnnnnnnnnnnnnnnnnnnnnnnnnnnnnnnnnnnnnnnnnnnnnnnnnnnnnnnnnnnnnnnnnnnnnnnnnnnnnnnnnnnnnnnnnnnnnnnnnnnnnnnnnnnnnnnnnnnnnnnnnnnnnnnnnnnnnnnnnnnnnnnnnnnnnnnnnnnnnnnnnnnnnnnnnnnnnnnnnnnnnnnnnnnnnnnnnnnnnnnnnnnnnnnnnnnnnnnnnnnnnnnnnnnnnnnnnnnnnnnnnnnnnnnnnnnnnnnnnnnnnnnnnnnnnnnnnnnnnnnnnnnnnnnnnnnnnnnnnnnnnnnnnnnnnnnnnnnnnnnnnnnnnnnnnnnnnnnnnnnnnnnnnnnnnnnnnnnnnnnnnnnnnnnnnnnnnnnnnnnnnnnnnnnnnnnnnnnnnnnnnnnnnnnnnnnnnnnnnnnnnnnnnnnnnnnnnnnnnnnnnnnnnnnnnnnnnnnnnnnnnnnnnnnnnnnnnnnnnnnnnnnnnnnnnnnnnnnnnnnnnnnnnnnnnnnnnnnnnnnnnnnnnnnnnnnnnnnnnnnnnnnnnnnnnnnnnnnnnnnnnnnnnnnnnnnnnnnnnnnnnnnnnnnnnnnnnnnnnnnnnnnnnnnnnnnnnnnnnnnnnnnnnnnnnnnnnnnnnnnnnnnnnnnnnnnnnnnnnnnnnnnnnnnnnnnnnnnnnnnnnnnnnnnnnnnnnnnnnnnnnnnnnnnnnnnnnnnnnnnnnnnnnnnnnnnnnnnnnnnnnnnnnnnnnnnnnnnnnnnnnnnnnnnnnnnnnnnnnnnnnnnnnnnnnnnnnnnnnnnnnnnnnnnnnnnnnnnnnnnnnnnnnnnnnnnnnnnnnnnnnnnnnnnnnnnnnnnnnnnnnnnnnnnnnnnnnnnnnnnnnnnnnnnnnnnnnnnnnnnnnnnnnnnnnnnnnnnnnnnnnnnnnnnnnnnnnnnnnnnnnnnnnnnnnnnnnnnnnnnnnnnnnnnnnnnnnnnnnnnnnnnnnnnnnnnnnnnnnnnnnnnnnnnnnnnnnnnnnnnnnnnnnnnnnnnnnnnnnnnnnnnnnnnnnnnnnnnnnnnnnnnnnnnnnnnnnnnnnnnnnnnnnnnnnnnnnnnnnnnnnnnnnnnnnnnnnnnnnnnnnnnnnnnnnnnnnnnnnnnnnnnnnnnnnnnnnnnnnnnnnnnnnnnnnnnnnnnnnnnnnnnnnnnnnnnnnnnnnnnnnnnnnnnnnnnnnnnnnnnnnnnnnnnnnnnnnnnnnnnnnnnnnnnnnnnnnnnnnnnnnnnnnnnnnnnnnnnnnnnnnnnnnnnnnnnnnnnnnnnnnnnnnnnnnnnnnnnnnnnnnnnnnnnnnnnnnnnnnnnnnnnnnnnnnnnnnnnnnnnnnnnnnnnnnnnnnnnnnnnnnnnnnnnnnnnnnnnnnnnnnnnnnnnnnnnnnnnnnnnnnnnnnnnnnnnnnnnnnnnnnnnnnnnnnnnnnnnnnnnnnnnnnnnnnnnnnnnnnnnnnnnnnnnnnnnnnnnnnnnnnnnnnnnnnnnnnnnnnnnnnnnnnnnnnnnnnnnnnnnnnnnnnnnnnnnnnnnnnnnnnnnnnnnnnnnnnnnnnnnnnnnnnnnnnnnnnnnnnnnnnnnnnnnnnnnnnnnnnnnnnnnnnnnnnnnnnnnnnnnnnnnnnnnnnnnnnnnnnnnnnnnnnnnnnnnnnnnnnnnnnnnnnnnnnnnnnnnnnnnnnnnnnnnnnnnnnnnnnnnnnnnnnnnnnnnnnnnnnnnnnnnnnnnnnnnnnnnnnnnnnnnnnnnnnnnnnnnnnnnnnnnnnnnnnnnnnnnnnnnnnnnnnnnnnnnnnnnnnnnnnnnnnnnnnnnnnnnnnnnnnnnnnnnnnnnnnnnnnnnnnnnnnnnnnnnnnnnnnnnnnnnnnnnnnnnnnnnnnnnnnnnnnnnnnnnnnnnnnnnnnnnnnnnnnnnnnnnnnnnnnnnnnnnnnnnnnnnnnnnnnnnnnnnnnnnnnnnnnnnnnnnnnnnnnnnnnnnnnnnnnnnnnnnnnnnnnnnnnnnnnnnnnnnnnnnnnnnnnnnnnnnnnnnnnnnnnnnnnnnnnnnnnnnnnnnnnnnnnnnnnnnnnnnnnnnnnnnnnnnnnnnnnnnnnnnnnnnnnnnnnnnnnnnnnnnnnnnnnnnnnnnnnnnnnnnnnnnnnnnnnnnnnnnnnnnnnnnnnnnnnnnnnnnnnnnnnnnnnnnnnnnnnnnnnnnnnnnnnnnnnnnnnnnnnnnnnnnnnnnnnnnnnnnnnnnnnnnnnnnnnnnnnnnnnnnnnnnnnnnnnnnnnnnnnnnnnnnnnnnnnnnnnnnnnnnnnnnnnnnnnnnnnnnnnnnnnnnnnnnnnnnnnnnnnnnnnnnnnnnnnnnnnnnnnnnnnnnnnnnnnnnnnnnnnnnnnnnnnnnnnnnnnnnnnnnnnnnnnnnnnnnnnnnnnnnnnnnnnnnnnnnnnnnnnnnnnnnnnnnnnnnnnnnnnnnnnnnnnnnnnnnnnnnnnnnnnnnnnnnnnnnnnnnnnnnnnnnnnnnnnnnnnnnnnnnnnnnnnnnnnnnnnnnnnnnnnnnnnnnnnnnnnnnnnnnnnnnnnnnnnnnnnnnnnnnnnnnnnnnnnnnnnnnnnnnnnnnnnnnnnnnnnnnnnnnnnnnnnnnnnnnnnnnnnnnnnnnnnnnnnnnnnnnnnnnnnnnnnnnnnnnnnnnnnnnnnnnnnnnnnnnnnnnnnnnnnnnnnnnnnnnnnnnnnnnnnnnnnnnnnnnnnnnnnnnnnnnnnnnnnnnnnnnnnnnnnnnnnnnnnnnnnnnnnnnnnnnnnnnnnnnnnnnnnnnnnnnnnnnnnnnnnnnnnnnnnnnnnnnnnnnnnnnnnnnnnnnnnnnnnnnnnnnnnnnnnnnnnnnnnnnnnnnnnnnnnnnnnnnnnnnnnnnnnnnnnnnnnnnnnnnnnnnnnnnnnnnnnnnnnnnnnnnnnnnnnnnnnnnnnnnnnnnnnnnnnnnnnnnnnnnnnnnnnnnnnnnnnnnnnnnnnnnnnnnnnnnnnnnnnnnnnnnnnnnnnnnnnnnnnnnnnnnnnnnnnnnnnnnnnnnnnnnnnnnnnnnnnnnnnnnnnnnnnnnnnnnnnnnnnnnnnnnnnnnnnnnnnnnnnnnnnnnnnnnnnnnnnnnnnnnnnnnnnnnnnnnnnnnnnnnnnnnnnnnnnnnnnnnnnnnnnnnnnnnnnnnnnnnnnnnnnnnnnnnnnnnnnnnnnnnnnnnnnnnnnnnnnnnnnnnnnnnnnnnnnnnnnnnnnnnnnnnnnnnnnnnnnnnnnnnnnnnnnnnnnnnnnnnnnnnnnnnnnnnnnnnnnnnnnnnnnnnnnnnnnnnnnnnnnnnnnnnnnnnnnnnnnnnnnnnnnnnnnnnnnnnnnnnnnnnnnnnnnnnnnnnnnnnnnnnnnnnnnnnnnnnnnnnnnnnnnnnnnnnnnnnnnnnnnnnnnnnnnnnnnnnnnnnnnnnnnnnnnnnnnnnnnnnnnnnnnnnnnnnnnnnnnnnnnnnnnnnnnnnnnnnnnnnnnnnnnnnnnnnnnnnnnnnnnnnnnnnnnnnnnnnnnnnnnnnnnnnnnnnnnnnnnnnnnnnnnnnnnnnnnnnnnnnnnnnnnnnnnnnnnnnnnnnnnnnnnnnnnnnnnnnnnnnnnnnnnnnnnnnnnnnnnnnnnnnnnnnnnnnnnnnnnnnnnnnnnnnnnnnnnnnnnnnnnnnnnnnnnnnnnnnnnnnnnnnnnnnnnnnnnnnnnnnnnnnnnnnnnnnnnnnnnnnnnnnnnnnnnnnnnnnnnnnnnnnnnnnnnnnnnnnnnnnnnnnnnnnnnnnnnnnnnnnnnnnnnnnnnnnnnnnnnnnnnnnnnnnnnnnnnnnnnnnnnnnnnnnnnnnnnnnnnnnnnnnnnnnnnnnnnnnnnnnnnnnnnnnnnnnnnnnnnnnnnnnnnnnnnnnnnnnnnnnnnnnnnnnnnnnnnnnnnnnnnnnnnnnnnnnnnnnnnnnnnnnnnnnnnnnnnnnnnnnnnnnnnnnnnnnnnnnnnnnnnnnnnnnnnnnnnnnnnnnnnnnnnnnnnnnnnnnnnnnnnnnnnnnnnnnnnnnnnnnnnnnnnnnnnnnnnnnnnnnnnnnnnnnnnnnnnnnnnnnnnnnnnnnnnnnnnnnnnnnnnnnnnnnnnnnnnnnnnnnnnnnnnnnnnnnnnnnnnnnnnnnnnnnnnnnnnnnnnnnnnnnnnnnnnnnnnnnnnnnnnnnnnnnnnnnnnnnnnnnnnnnnnnnnnnnnnnnnnnnnnnnnnnnnnnnnnnnnnnnnnnnnnnnnnnnnnnnnnnnnnnnnnnnnnnnnnnnnnnnnnnnnnnnnnnnnnnnnnnnnnnnnnnnnnnnnnnnnnnnnnnnnnnnnnnnnnnnnnnnnnnnnnnnnnnnnnnnnnnnnnnnnnnnnnnnnnnnnnnnnnnnnnnnnnnnnnnnnnnnnnnnnnnnnnnnnnnnnnnnnnnnnnnnnnnnnnnnnnnnnnnnnnnnnnnnnnnnnnnnnnnnnnnnnnnnnnnnnnnnnnnnnnnnnnnnnnnnnnnnnnnnnnnnnnnnnnnnnnnnnnnnnnnnnnnnnnnnnnnnnnnnnnnnnnnnnnnnnnnnnnnnnnnnnnnnnnnnnnnnnnnnnnnnnnnnnnnnnnnnnnnnnnnnnnnnnnnnnnnnnnnnnnnnnnnnnnnnnnnnnnnnnnnnnnnnnnnnnnnnnnnnnnnnnnnnnnnnnnnnnnnnnnnnnnnnnnnnnnnnnnnnnnnnnnnnnnnnnnnnnnnnnnnnnnnnnnnnnnnnnnnnnnnnnnnnnnnnnnnnnnnnnnnnnnnnnnnnnnnnnnnnnnnnnnnnnnnnnnnnnnnnnnnnnnnnnnnnnnnnnnnnnnnnnnnnnnnnnnnnnnnnnnnnnnnnnnnnnnnnnnnnnnnnnnnnnnnnnnnnnnnnnnnnnnnnnnnnnnnnnnnnnnnnnnnnnnnnnnnnnnnnnnnnnnnnnnnnnnnnnnnnnnnnnnnnnnnnnnnnnnnnnnnnnnnnnnnnnnnnnnnnnnnnnnnnnnnnnnnnnnnnnnnnnnnnnnnnnnnnnnnnnnnnnnnnnnnnnnnnnnnnnnnnnnnnnnnnnnnnnnnnnnnnnnnnnnnnnnnnnnnnnnnnnnnnnnnnnnnnnnnnnnnnnnnnnnnnnnnnnnnnnnnnnnnnnnnnnnnnnnnnnnnnnnnnnnnnnnnnnnnnnnnnnnnnnnnnnnnnnnnnnnnnnnnnnnnnnnnnnnnnnnnnnnnnnnnnnnnnnnnnnnnnnnnnnnnnnnnnnnnnnnnnnnnnnnnnnnnnnnnnnnnnnnnnnnnnnnnnnnnnnnnnnnnnnnnnnnnnnnnnnnnnnnnnnnnnnnnnnnnnnnnnnnnnnnnnnnnnnnnnnnnnnnnnnnnnnnnnnnnnnnnnnnnnnnnnnnnnnnnnnnnnnnnnnnnnnnnnnnnnnnnnnnnnnnnnnnnnnnnnnnnnnnnnnnnnnnnnnnnnnnnnnnnnnnnnnnnnnnnnnnnnnnnnnnnnnnnnnnnnnnnnnnnnnnnnnnnnnnnnnnnnnnnnnnnnnnnnnnnnnnnnnnnnnnnnnnnnnnnnnnnnnnnnnnnnnnnnnnnnnnnnnnnnnnnnnnnnnnnnnnnnnnnnnnnnnnnnnnnnnnnnnnnnnnnnnnnnnnnnnnnnnnnnnnnnnnnnnnnnnnnnnnnnnnnnnnnnnnnnnnnnnnnnnnnnnnnnnnnnnnnnnnnnnnnnnnnnnnnnnnnnnnnnnnnnnnnnnnnnnnnnnnnnnnnnnnnnnnnnnnnnnnnnnnnnnnnnnnnnnnnnnnnnnnnnnnnnnnnnnnnnnnnnnnnnnnnnnnnnnnnnnnnnnnnnnnnnnnnnnnnnnnnnnnnnnnnnnnnnnnnnnnnnnnnnnnnnnnnnnnnnnnnnnnnnnnnnnnnnnnnnnnnnnnnnnnnnnnnnnnnnnnnnnnnnnnnnnnnnnnnnnnnnnnnnnnnnnnnnnnnnnnnnnnnnnnnnnnnnnnnnnnnnnnnnnnnnnnnnnnnnnnnnnnnnnnnnnnnnnnnnnnnnnnnnnnnnnnnnnnnnnnnnnnnnnnnnnnnnnnnnnnnnnnnnnnnnnnnnnnnnnnnnnnnnnnnnnnnnnnnnnnnnnnnnnnnnnnnnnnnnnnnnnnnnnnnnnnnnnnnnnnnnnnnnnnnnnnnnnnnnnnnnnnnnnnnnnnnnnnnnnnnnnnnnnnnnnnnnnnnnnnnnnnnnnnnnnnnnnnnnnnnnnnnnnnnnnnnnnnnnnnnnnnnnnnnnnnnnnnnnnnnnnnnnnnnnnnnnnnnnnnnnnnnnnnnnnnnnnnnnnnnnnnnnnnnnnnnnnnnnnnnnnnnnnnnnnnnnnnnnnnnnnnnnnnnnnnnnnnnnnnnnnnnnnnnnnnnnnnnnnnnnnnnnnnnnnnnnnnnnnnnnnnnnnnnnnnnnnnnnnnnnnnnnnnnnnnnnnnnnnnnnnnnnnnnnnnnnnnnnnnnnnnnnnnnnnnnnnnnnnnnnnnnnnnnnnnnnnnnnnnnnnnnnnnnnnnnnnnnnnnnnnnnnnnnnnnnnnnnnnnnnnnnnnnnnnnnnnnnnnnnnnnnnnnnnnnnnnnnnnnnnnnnnnnnnnnnnnnnnnnnnnnnnnnnnnnnnnnnnnnnnnnnnnnnnnnnnnnnnnnnnnnnnnnnnnnnnnnnnnnnnnnnnnnnnnnnnnnnnnnnnnnnnnnnnnnnnnnnnnnnnnnnnnnnnnnnnnnnnnnnnnnnnnnnnnnnnnnnnnnnnnnnnnnnnnnnnnnnnnnnnnnnnnnnnnnnnnnnnnnnnnnnnnnnnnnnnnnnnnnnnnnnnnnnnnnnnnnnnnnnnnnnnnnnnnnnnnnnnnnnnnnnnnnnnnnnnnnnnnnnnnnnnnnnnnnnnnnnnnnnnnnnnnnnnnnnnnnnnnnnnnnnnnnnnnnnnnnnnnnnnnnnnnnnnnnnnnnnnnnnnnnnnnnnnnnnnnnnnnnnnnnnnnnnnnnnnnnnnnnnnnnnnnnnnnnnnnnnnnnnnnnnnnnnnnnnnnnnnnnnnnnnnnnnnnnnnnnnnnnnnnnnnnnnnnnnnnnnnnnnnnnnnnnnnnnnnnnnnnnnnnnnnnnnnnnnnnnnnnnnnnnnnnnnnnnnnnnnnnnnnnnnnnnnnnnnnnnnnnnnnnnnnnnnnnnnnnnnnnnnnnnnnnnnnnnnnnnnnnnnnnnnnnnnnnnnnnnnnnnnnnnnnnnnnnnnnnnnnnnnnnnnnnnnnnnnnnnnnnnnnnnnnnnnnnnnnnnnnnnnnnnnnnnnnnnnnnnnnnnnnnnnnnnnnnnnnnnnnnnnnnnnnnnnnnnnnnnnnnnnnnnnnnnnnnnnnnnnnnnnnnnnnnnnnnnnnnnnnnnnnnnnnnnnnnnnnnnnnnnnnnnnnnnnnnnnnnnnnnnnnnnnnnnnnnnnnnnnnnnnnnnnnnnnnnnnnnnnnnnnnnnnnnnnnnnnnnnnnnnnnnnnnnnnnnnnnnnnnnnnnnnnnnnnnnnnnnnnnnnnnnnnnnnnnnnnnnnnnnnnnnnnnnnnnnnnnnnnnnnnnnnnnnnnnnnnnnnnnnnnnnnnnnnnnnnnnnnnnnnnnnnnnnnnnnnnnnnnnnnnnnnnnnnnnnnnnnnnnnnnnnnnnnnnnnnnnnnnnnnnnnnnnnnnnnnnnnnnnnnnnnnnnnnnnnnnnnnnnnnnnnnnnnnnnnnnnnnnnnnnnnnnnnnnnnnnnnnnnnnnnnnnnnnnnnnnnnnnnnnnnnnnnnnnnnnnnnnnnnnnnnnnnnnnnnnnnnnnnnnnnnnnnnnnnnnnnnnnnnnnnnnnnnnnnnnnnnnnnnnnnnnnnnnnnnnnnnnnnnnnnnnnnnnnnnnnnnnnnnnnnnnnnnnnnnnnnnnnnnnnnnnnnnnnnnnnnnnnnnnnnnnnnnnnnnnnnnnnnnnnnnnnnnnnnnnnnnnnnnnnnnnnnnnnnnnnnnnnnnnnnnnnnnnnnnnnnnnnnnnnnnnnnnnnnnnnnnnnnnnnnnnnnnnnnnnnnnnnnnnnnnnnnnnnnnnnnnnnnnnnnnnnnnnnnnnnnnnnnnnnnnnnnnnnnnnnnnnnnnnnnnnnnnnnnnnnnnnnnnnnnnnnnnnnnnnnnnnnnnnnnnnnnnnnnnnnnnnnnnnnnnnnnnnnnnnnnnnnnnnnnnnnnnnnnnnnnnnnnnnnnnnnnnnnnnnnnnnnnnnnnnnnnnnnnnnnnnnnnnnnnnnnnnnnnnnnnnnnnnnnnnnnnnnnnnnnnnnnnnnnnnnnnnnnnnnnnnnnnnnnnnnnnnnnnnnnnnnnnnnnnnnnnnnnnnnnnnnnnnnnnnnnnnnnnnnnnnnnnnnnnnnnnnnnnnnnnnnnnnnnnnnnnnnnnnnnnnnnnnnnnnnnnnnnnnnnnnnnnnnnnnnnnnnnnnnnnnnnnnnnnnnnnnnnnnnnnnnnnnnnnnnnnnnnnnnnnnnnnnnnnnnnnnnnnnnnnnnnnnnnnnnnnnnnnnnnnnnnnnnnnnnnnnnnnnnnnnnnnnnnnnnnnnnnnnnnnnnnnnnnnnnnnnnnnnnnnnnnnnnnnnnnnnnnnnnnnnnnnnnnnnnnnnnnnnnnnnnnnnnnnnnnnnnnnnnnnnnnnnnnnnnnnnnnnnnnnnnnnnnnnnnnnnnnnnnnnnnnnnnnnnnnnnnnnnnnnnnnnnnnnnnnnnnnnnnnnnnnnnnnnnnnnnnnnnnnnnnnnnnnnnnnnnnnnnnnnnnnnnnnnnnnnnnnnnnnnnnnnnnnnnnnnnnnnnnnnnnnnnnnnnnnnnnnnnnnnnnnnnnnnnnnnnnnnnnnnnnnnnnnnnnnnnnnnnnnnnnnnnnnnnnnnnnnnnnnnnnnnnnnnnnnnnnnnnnnnnnnnnnnnnnnnnnnnnnnnnnnnnnnnnnnnnnnnnnnnnnnnnnnnnnnnnnnnnnnnnnnnnnnnnnnnnnnnnnnnnnnnnnnnnnnnnnnnnnnnnnnnnnnnnnnnnnnnnnnnnnnnnnnnnnnnnnnnnnnnnnnnnnnnnnnnnnnnnnnnnnnnnnnnnnnnnnnnnnnnnnnnnnnnnnnnnnnnnnnnnnnnnnnnnnnnnnnnnnnnnnnnnnnnnnnnnnnnnnnnnnnnnnnnnnnnnnnnnnnnnnnnnnnnnnnnnnnnnnnnnnnnnnnnnnnnnnnnnnnnnnnnnnnnnnnnnnnnnnnnnnnnnnnnnnnnnnnnnnnnnnnnnnnnnnnnnnnnnnnnnnnnnnnnnnnnnnnnnnnnnnnnnnnnnnnnnnnnnnnnnnnnnnnnnnnnnnnnnnnnnnnnnnnnnnnnnnnnnnnnnnnnnnnnnnnnnnnnnnnnnnnnnnnnnnnnnnnnnnnnnnnnnnnnnnnnnnnnnnnnnnnnnnnnnnnnnnnnnnnnnnnnnnnnnnnnnnnnnnnnnnnnnnnnnnnnnnnnnnnnnnnnnnnnnnnnnnnnnnnnnnnnnnnnnnnnnnnnnnnnnnnnnnnnnnnnnnnnnnnnnnnnnnnnnnnnnnnnnnnnnnnnnnnnnnnnnnnnnnnnnnnnnnnnnnnnnnnnnnnnnnnnnnnnnnnnnnnnnnnnnnnnnnnnnnnnnnnnnnnnnnnnnnnnnnnnnnnnnnnnnnnnnnnnnnnnnnnnnnnnnnnnnnnnnnnnnnnnnnnnnnnnnnnnnnnnnnnnnnnnnnnnnnnnnnnnnnnnnnnnnnnnnnnnnnnnnnnnnnnnnnnnnnnnnnnnnnnnnnnnnnnnnnnnnnnnnnnnnnnnnnnnnnnnnnnnnnnnnnnnnnnnnnnnnnnnnnnnnnnnnnnnnnnnnnnnnnnnnnnnnnnnnnnnnnnnnnnnnnnnnnnnnnnnnnnnnnnnnnnnnnnnnnnnnnnnnnnnnnnnnnnnnnnnnnnnnnnnnnnnnnnnnnnnnnnnnnnnnnnnnnnnnnnnnnnnnnnnnnnnnnnnnnnnnnnnnnnnnnnnnnnnnnnnnnnnnnnnnnnnnnnnnnnnnnnnnnnnnnnnnnnnnnnnnnnnnnnnnnnnnnnnnnnnnnnnnnnnnnnnnnnnnnnnnnnnnnnnnnnnnnnnnnnnnnnnnnnnnnnnnnnnnnnnnnnnnnnnnnnnnnnnnnnnnnnnnnnnnnnnnnnnnnnnnnnnnnnnnnnnnnnnnnnnnnnnnnnnnnnnnnnnnnnnnnnnnnnnnnnnnnnnnnnnnnnnnnnnnnnnnnnnnnnnnnnnnnnnnnnnnnnnnnnnnnnnnnnnnnnnnnnnnnnnnnnnnnnnnnnnnnnnnnnnnnnnnnnnnnnnnnnnnnnnnnnnnnnnnnnnnnnnnnnnnnnnnnnnnnnnnnnnnnnnnnnnnnnnnnnnnnnnnnnnnnnnnnnnnnnnnnnnnnnnnnnnnnnnnnnnnnnnnnnnnnnnnnnnnnnnnnnnnnnnnnnnnnnnnnnnnnnnnnnnnnnnnnnnnnnnnnnnnnnnnnnnnnnnnnnnnnnnnnnnnnnnnnnnnnnnnnnnnnnnnnnnnnnnnnnnnnnnnnnnnnnnnnnnnnnnnnnnnnnnnnnnnnnnnnnnnnnnnnnnnnnnnnnnnnnnnnnnnnnnnnnnnnnnnnnnnnnnnnnnnnnnnnnnnnnnnnnnnnnnnnnnnnnnnnnnnnnnnnnnnnnnnnnnnnnnnnnnnnnnnnnnnnnnnnnnnnnnnnnnnnnnnnnnnnnnnnnnnnnnnnnnnnnnnnnnnnnnnnnnnnnnnnnnnnnnnnnnnnnnnnnnnnnnnnnnnnnnnnnnnnnnnnnnnnnnnnnnnnnnnnnnnnnnnnnnnnnnnnnnnnnnnnnnnnnnnnnnnnnnnnnnnnnnnnnnnnnnnnnnnnnnnnnnnnnnnnnnnnnnnnnnnnnnnnnnnnnnnnnnnnnnnnnnnnnnnnnnnnnnnnnnnnnnnnnnnnnnnnnnnnnnnnnnnnnnnnnnnnnnnnnnnnnnnnnnnnnnnnnnnnnnnnnnnnnnnnnnnnnnnnnnnnnnnnnnnnnnnnnnnnnnnnnnnnnnnnnnnnnnnnnnnnnnnnnnnnnnnnnnnnnnnnnnnnnnnnnnnnnnnnnnnnnnnnnnnnnnnnnnnnnnnnnnnnnnnnnnnnnnnnnnnnnnnnnnnnnnnnnnnnnnnnnnnnnnnnnnnnnnnnnnnnnnnnnnnnnnnnnnnnnnnnnnnnnnnnnnnnnnnnnnnnnnnnnnnnnnnnnnnnnnnnnnnnnnnnnnnnnnnnnnnnnnnnnnnnnnnnnnnnnnnnnnnnnnnnnnnnnnnnnnnnnnnnnnnnnnnnnnnnnnnnnnnnnnnnnnnnnnnnnnnnnnnnnnnnnnnnnnnnnnnnnnnnnnnnnnnnnnnnnnnnnnnnnnnnnnnnnnnnnnnnnnnnnnnnnnnnnnnnnnnnnnnnnnnnnnnnnnnnnnnnnnnnnnnnnnnnnnnnnnnnnnnnnnnnnnnnnnnnnnnnnnnnnnnnnnnnnnnnnnnnnnnnnnnnnnnnnnnnnnnnnnnnnnnnnnnnnnnnnnnnnnnnnnnnnnnnnnnnnnnnnnnnnnnnnnnnnnnnnnnnnnnnnnnnnnnnnnnnnnnnnnnnnnnnnnnnnnnnnnnnnnnnnnnnnnnnnnnnnnnnnnnnnnnnnnnnnnnnnnnnnnnnnnnnnnnnnnnnnnnnnnnnnnnnnnnnnnnnnnnnnnnnnnnnnnnnnnnnnnnnnnnnnnnnnnnnnnnnnnnnnnnnnnnnnnnnnnnnnnnnnnnnnnnnnnnnnnnnnnnnnnnnnnnnnnnnnnnnnnnnnnnnnnnnnnnnnnnnnnnnnnnnnnnnnnnnnnnnnnnnnnnnnnnnnnnnnnnnnnnnnnnnnnnnnnnnnnnnnnnnnnnnnnnnnnnnnnnnnnnnnnnnnnnnnnnnnnnnnnnnnnnnnnnnnnnnnnnnnnnnnnnnnnnnnnnnnnnnnnnnnnnnnnnnnnnnnnnnnnnnnnnnnnnnnnnnnnnnnnnnnnnnnnnnnnnnnnnnnnnnnnnnnnnnnnnnnnnnnnnnnnnnnnnnnnnnnnnnnnnnnnnnnnnnnnnnnnnnnnnnnnnnnnnnnnnnnnnnnnnnnnnnnnnnnnnnnnnnnnnnnnnnnnnnnnnnnnnnnnnnnnnnnnnnnnnnnnnnnnnnnnnnnnnnnnnnnnnnnnnnnnnnnnnnnnnnnnnnnnnnnnnnnnnnnnnnnnnnnnnnnnnnnnnnnnnnnnnnnnnnnnnnnnnnnnnnnnnnnnnnnnnnnnnnnnnnnnnnnnnnnnnnnnnnnnnnnnnnnnnnnnnnnnnnnnnnnnnnnnnnnnnnnnnnnnnnnnnnnnnnnnnnnnnnnnnnnnnnnnnnnnnnnnnnnnnnnnnnnnnnnnnnnnnnnnnnnnnnnnnnnnnnnnnnnnnnnnnnnnnnnnnnnnnnnnnnnnnnnnnnnnnnnnnnnnnnnnnnnnnnnnnnnnnnnnnnnnnnnnnnnnnnnnnnnnnnnnnnnnnnnnnnnnnnnnnnnnnnnnnnnnnnnnnnnnnnnnnnnnnnnnnnnnnnnnnnnnnnnnnnnnnnnnnnnnnnnnnnnnnnnnnnnnnnnnnnnnnnnnnnnnnnnnnnnnnnnnnnnnnnnnnnnnnnnnnnnnnnnnnnnnnnnnnnnnnnnnnnnnnnnnnnnnnnnnnnnnnnnnnnnnnnnnnnnnnnnnnnnnnnnnnnnnnnnnnnnnnnnnnnnnnnnnnnnnnnnnnnnnnnnnnnnnnnnnnnnnnnnnnnnnnnnnnnnnnnnnnnnnnnnnnnnnnnnnnnnnnnnnnnnnnnnnnnnnnnnnnnnnnnnnnnnnnnnnnnnnnnnnnnnnnnnnnnnnnnnnnnnnnnnnnnnnnnnnnnnnnnnnnnnnnnnnnnnnnnnnnnnnnnnnnnnnnnnnnnnnnnnnnnnnnnnnnnnnnnnnnnnnnnnnnnnnnnnnnnnnnnnnnnnnnnnnnnnnnnnnnnnnnnnnnnnnnnnnnnnnnnnnnnnnnnnnnnnnnnnnnnnnnnnnnnnnnnnnnnnnnnnnnnnnnnnnnnnnnnnnnnnnnnnnnnnnnnnnnnnnnnnnnnnnnnnnnnnnnnnnnnnnnnnnnnnnnnnnnnnnnnnnnnnnnnnnnnnnnnnnnnnnnnnnnnnnnnnnnnnnnnnnnnnnnnnnnnnnnnnnnnnnnnnnnnnnnnnnnnnnnnnnnnnnnnnnnnnnnnnnnnnnnnnnnnnnnnnnnnnnnnnnnnnnnnnnnnnnnnnnnnnnnnnnnnnnnnnnnnnnnnnnnnnnnnnnnnnnnnnnnnnnnnnnnnnnnnnnnnnnnnnnnnnnnnnnnnnnnnnnnnnnnnnnnnnnnnnnnnnnnnnnnnnnnnnnnnnnnnnnnnnnnnnnnnnnnnnnnnnnnnnnnnnnnnnnnnnnnnnnnnnnnnnnnnnnnnnnnnnnnnnnnnnnnnnnnnnnnnnnnnnnnnnnnnnnnnnnnnnnnnnnnnnnnnnnnnnnnnnnnnnnnnnnnnnnnnnnnnnnnnnnnnnnnnnnnnnnnnnnnnnnnnnnnnnnnnnnnnnnnnnnnnnnnnnnnnnnnnnnnnnnnnnnnnnnnnnnnnnnnnnnnnnnnnnnnnnnnnnnnnnnnnnnnnnnnnnnnnnnnnnnnnnnnnnnnnnnnnnnnnnnnnnnnnnnnnnnnnnnnnnnnnnnnnnnnnnnnnnnnnnnnnnnnnnnnnnnnnnnnnnnnnnnnnnnnnnnnnnnnnnnnnnnnnnnnnnnnnnnnnnnnnnnnnnnnnnnnnnnnnnnnnnnnnnnnnnnnnnnnnnnnnnnnnnnnnnnnnnnnnnnnnnnnnnnnnnnnnnnnnnnnnnnnnnnnnnnnnnnnnnnnnnnnnnnnnnnnnnnnnnnnnnnnnnnnnnnnnnnnnnnnnnnnnnnnnnnnnnnnnnnnnnnnnnnnnnnnnnnnnnnnnnnnnnnnnnnnnnnnnnnnnnnnnnnnnnnnnnnnnnnnnnnnnnnnnnnnnnnnnnnnnnnnnnnnnnnnnnnnnnnnnnnnnnnnnnnnnnnnnnnnnnnnnnnnnnnnnnnnnnnnnnnnnnnnnnnnnnnnnnnnnnnnnnnnnnnnnnnnnnnnnnnnnnnnnnnnnnnnnnnnnnnnnnnnnnnnnnnnnnnnnnnnnnnnnnnnnnnnnnnnnnnnnnnnnnnnnnnnnnnnnnnnnnnnnnnnnnnnnnnnnnnnnnnnnnnnnnnnnnnnnnnnnnnnnnnnnnnnnnnnnnnnnnnnnnnnnnnnnnnnnnnnnnnnnnnnnnnnnnnnnnnnnnnnnnnnnnnnnnnnnnnnnnnnnnnnnnnnnnnnnnnnnnnnnnnnnnnnnnnnnnnnnnnnnnnnnnnnnnnnnnnnnnnnnnnnnnnnnnnnnnnnnnnnnnnnnnnnnnnnnnnnnnnnnnnnnnnnnnnnnnnnnnnnnnnnnnnnnnnnnnnnnnnnnnnnnnnnnnnnnnnnnnnnnnnnnnnnnnnnnnnnnnnnnnnnnnnnnnnnnnnnnnnnnnnnnnnnnnnnnnnnnnnnnnnnnnnnnnnnnnnnnnnnnnnnnnnnnnnnnnnnnnnnnnnnnnnnnnnnnnnnnnnnnnnnnnnnnnnnnnnnnnnnnnnnnnnnnnnnnnnnnnnnnnnnnnnnnnnnnnnnnnnnnnnnnnnnnnnnnnnnnnnnnnnnnnnnnnnnnnnnnnnnnnnnnnnnnnnnnnnnnnnnnnnnnnnnnnnnnnnnnnnnnnnnnnnnnnnnnnnnnnnnnnnnnnnnnnnnnnnnnnnnnnnnnnnnnnnnnnnnnnnnnnnnnnnnnnnnnnnnnnnnnnnnnnnnnnnnnnnnnnnnnnnnnnnnnnnnnnnnnnnnnnnnnnnnnnnnnnnnnnnnnnnnnnnnnnnnnnnnnnnnnnnnnnnnnnnnnnnnnnnnnnnnnnnnnnnnnnnnnnnnnnnnnnnnnnnnnnnnnnnnnnnnnnnnnnnnnnnnnnnnnnnnnnnnnnnnnnnnnnnnnnnnnnnnnnnnnnnnnnnnnnnnnnnnnnnnnnnnnnnnnnnnnnnnnnnnnnnnnnnnnnnnnnnnnnnnnnnnnnnnnnnnnnnnnnnnnnnnnnnnnnnnnnnnnnnnnnnnnnnnnnnnnnnnnnnnnnnnnnnnnnnnnnnnnnnnnnnnnnnnnnnnnnnnnnnnnnnnnnnnnnnnnnnnnnnnnnnnnnnnnnnnnnnnnnnnnnnnnnnnnnnnnnnnnnnnnnnnnnnnnnnnnnnnnnnnnnnnnnnnnnnnnnnnnnnnnnnnnnnnnnnnnnnnnnnnnnnnnnnnnnnnnnnnnnnnnnnnnnnnnnnnnnnnnnnnnnnnnnnnnnnnnnnnnnnnnnnnnnnnnnnnnnnnnnnnnnnnnnnnnnnnnnnnnnnnnnnnnnnnnnnnnnnnnnnnnnnnnnnnnnnnnnnnnnnnnnnnnnnnnnnnnnnnnnnnnnnnnnnnnnnnnnnnnnnnnnnnnnnnnnnnnnnnnnnnnnnnnnnnnnnnnnnnnnnnnnnnnnnnnnnnnnnnnnnnnnnnnnnnnnnnnnnnnnnnnnnnnnnnnnnnnnnnnnnnnnnnnnnnnnnnnnnnnnnnnnnnnnnnnnnnnnnnnnnnnnnnnnnnnnnnnnnnnnnnnnnnnnnnnnnnnnnnnnnnnnnnnnnnnnnnnnnnnnnnnnnnnnnnnnnnnnnnnnnnnnnnnnnnnnnnnnnnnnnnnnnnnnnnnnnnnnnnnnnnnnnnnnnnnnnnnnnnnnnnnnnnnnnnnnnnnnnnnnnnnnnnnnnnnnnnnnnnnnnnnnnnnnnnnnnnnnnnnnnnnnnnnnnnnnnnnnnnnnnnnnnnnnnnnnnnnnnnnnnnnnnnnnnnnnnnnnnnnnnnnnnnnnnnnnnnnnnnnnnnnnnnnnnnnnnnnnnnnnnnnnnnnnnnnnnnnnnnnnnnnnnnnnnnnnnnnnnnnnnnnnnnnnnnnnnnnnnnnnnnnnnnnnnnnnnnnnnnnnnnnnnnnnnnnnnnnnnnnnnnnnnnnnnnnnnnnnnnnnnnnnnnnnnnnnnnnnnnnnnnnnnnnnnnnnnnnnnnnnnnnnnnnnnnnnnnnnnnnnnnnnnnnnnnnnnnnnnnnnnnnnnnnnnnnnnnnnnnnnnnnnnnnnnnnnnnnnnnnnnnnnnnnnnnnnnnnnnnnnnnnnnnnnnnnnnnnnnnnnnnnnnnnnnnnnnnnnnnnnnnnnnnnnnnnnnnnnnnnnnnnnnnnnnnnnnnnnnnnnnnnnnnnnnnnnnnnnnnnnnnnnnnnnnnnnnnnnnnnnnnnnnnnnnnnnnnnnnnnnnnnnnnnnnnnnnnnnnnnnnnnnnnnnnnnnnnnnnnnnnnnnnnnnnnnnnnnnnnnnnnnnnnnnnnnnnnnnnnnnnnnnnnnnnnnnnnnnnnnnnnnnnnnnnnnnnnnnnnnnnnnnnnnnnnnnnnnnnnnnnnnnnnnnnnnnnnnnnnnnnnnnnnnnnnnnnnnnnnnnnnnnnnnnnnnnnnnnnnnnnnnnnnnnnnnnnnnnnnnnnnnnnnnnnnnnnnnnnnnnnnnnnnnnnnnnnnnnnnnnnnnnnnnnnnnnnnnnnnnnnnnnnnnnnnnnnnnnnnnnnnnnnnnnnnnnnnnnnnnnnnnnnnnnnnnnnnnnnnnnnnnnnnnnnnnnnnnnnnnnnnnnnnnnnnnnnnnnnnnnnnnnnnnnnnnnnnnnnnnnnnnnnnnnnnnnnnnnnnnnnnnnnnnnnnnnnnnnnnnnnnnnnnnnnnnnnnnnnnnnnnnnnnnnnnnnnnnnnnnnnnnnnnnnnnnnnnnnnnnnnnnnnnnnnnnnnnnnnnnnnnnnnnnnnnnnnnnnnnnnnnnnnnnnnnnnnnnnnnnnnnnnnnnnnnnnnnnnnnnnnnnnnnnnnnnnnnnnnnnnnnnnnnnnnnnnnnnnnnnnnnnnnnnnnnnnnnnnnnnnnnnnnnnnnnnnnnnnnnnnnnnnnnnnnnnnnnnnnnnnnnnnnnnnnnnnnnnnnnnnnnnnnnnnnnnnnnnnnnnnnnnnnnnnnnnnnnnnnnnnnnnnnnnnnnnnnnnnnnnnnnnnnnnnnnnnnnnnnnnnnnnnnnnnnnnnnnnnnnnnnnnnnnnnnnnnnnnnnnnnnnnnnnnnnnnnnnnnnnnnnnnnnnnnnnnnnnnnnnnnnnnnnnnnnnnnnnnnnnnnnnnnnnnnnnnnnnnnnnnnnnnnnnnnnnnnnnnnnnnnnnnnnnnnnnnnnnnnnnnnnnnnnnnnnnnnnnnnnnnnnnnnnnnnnnnnnnnnnnnnnnnnnnnnnnnnnnnnnnnnnnnnnnnnnnnnnnnnnnnnnnnnnnnnnnnnnnnnnnnnnnnnnnnnnnnnnnnnnnnnnnnnnnnnnnnnnnnnnnnnnnnnnnnnnnnnnnnnnnnnnnnnnnnnnnnnnnnnnnnnnnnnnnnnnnnnnnnnnnnnnnnnnnnnnnnnnnnnnnnnnnnnnnnnnnnnnnnnnnnnnnnnnnnnnnnnnnnnnnnnnnnnnnnnnnnnnnnnnnnnnnnnnnnnnnnnnnnnnnnnnnnnnnnnnnnnnnnnnnnnnnnnnnnnnnnnnnnnnnnnnnnnnnnnnnnnnnnnnnnnnnnnnnnnnnnnnnnnnnnnnnnnnnnnnnnnnnnnnnnnnnnnnnnnnnnnnnnnnnnnnnnnnnnnnnnnnnnnnnnnnnnnnnnnnnnnnnnnnnnnnnnnnnnnnnnnnnnnnnnnnnnnnnnnnnnnnnnnnnnnnnnnnnnnnnnnnnnnnnnnnnnnnnnnnnnnnnnnnnnnnnnnnnnnnnnnnnnnnnnnnnnnnnnnnnnnnnnnnnnnnnnnnnnnnnnnnnnnnnnnnnnnnnnnnnnnnnnnnnnnnnnnnnnnnnnnnnnnnnnnnnnnnnnnnnnnnnnnnnnnnnnnnnnnnnnnnnnnnnnnnnnnnnnnnnnnnnnnnnnnnnnnnnnnnnnnnnnnnnnnnnnnnnnnnnnnnnnnnnnnnnnnnnnnnnnnnnnnnnnnnnnnnnnnnnnnnnnnnnnnnnnnnnnnnnnnnnnnnnnnnnnnnnnnnnnnnnnnnnnnnnnnnnnnnnnnnnnnnnnnnnnnnnnnnnnnnnnnnnnnnnnnnnnnnnnnnnnnnnnnnnnnnnnnnnnnnnnnnnnnnnnnnnnnnnnnnnnnnnnnnnnnnnnnnnnnnnnnnnnnnnnnnnnnnnnnnnnnnnnnnnnnnnnnnnnnnnnnnnnnnnnnnnnnnnnnnnnnnnnnnnnnnnnnnnnnnnnnnnnnnnnnnnnnnnnnnnnnnnnnnnnnnnnnnnnnnnnnnnnnnnnnnnnnnnnnnnnnnnnnnnnnnnnnnnnnnnnnnnnnnnnnnnnnnnnnnnnnnnnnnnnnnnnnnnnnnnnnnnnnnnnnnnnnnnnnnnnnnnnnnnnnnnnnnnnnnnnnnnnnnnnnnnnnnnnnnnnnnnnnnnnnnnnnnnnnnnnnnnnnnnnnnnnnnnnnnnnnnnnnnnnnnnnnnnnnnnnnnnnnnnnnnnnnnnnnnnnnnnnnnnnnnnnnnnnnnnnnnnnnnnnnnnnnnnnnnnnnnnnnnnnnnnnnnnnnnnnnnnnnnnnnnnnnnnnnnnnnnnnnnnnnnnnnnnnnnnnnnnnnnnnnnnnnnnnnnnnnnnnnnnnnnnnnnnnnnnnnnnnnnnnnnnnnnnnnnnnnnnnnnnnnnnnnnnnnnnnnnnnnnnnnnnnnnnnnnnnnnnnnnnnnnnnnnnnnnnnnnnnnnnnnnnnnnnnnnnnnnnnnnnnnnnnnnnnnnnnnnnnnnnnnnnnnnnnnnnnnnnnnnnnnnnnnnnnnnnnnnnnnnnnnnnnnnnnnnnnnnnnnnnnnnnnnnnnnnnnnnnnnnnnnnnnnnnnnnnnnnnnnnnnnnnnnnnnnnnnnnnnnnnnnnnnnnnnnnnnnnnnnnnnnnnnnnnnnnnnnnnnnnnnnnnnnnnnnnnnnnnnnnnnnnnnnnnnnnnnnnnnnnnnnnnnnnnnnnnnnnnnnnnnnnnnnnnnnnnnnnnnnnnnnnnnnnnnnnnnnnnnnnnnnnnnnnnnnnnnnnnnnnnnnnnnnnnnnnnnnnnnnnnnnnnnnnnnnnnnnnnnnnnnnnnnnnnnnnnnnnnnnnnnnnnnnnnnnnnnnnnnnnnnnnnnnnnnnnnnnnnnnnnnnnnnnnnnnnnnnnnnnnnnnnnnnnnnnnnnnnnnnnnnnnnnnnnnnnnnnnnnnnnnnnnnnnnnnnnnnnnnnnnnnnnnnnnnnnnnnnnnnnnnnnnnnnnnnnnnnnnnnnnnnnnnnnnnnnnnnnnnnnnnnnnnnnnnnnnnnnnnnnnnnnnnnnnnnnnnnnnnnnnnnnnnnnnnnnnnnnnnnnnnnnnnnnnnnnnnnnnnnnnnnnnnnnnnnnnnnnnnnnnnnnnnnnnnnnnnnnnnnnnnnnnnnnnnnnnnnnnnnnnnnnnnnnnnnnnnnnnnnnnnnnnnnnnnnnnnnnnnnnnnnnnnnnnnnnnnnnnnnnnnnnnnnnnnnnnnnnnnnnnnnnnnnnnnnnnnnnnnnnnnnnnnnnnnnnnnnnnnnnnnnnnnnnnnnnnnnnnnnnnnnnnnnnnnnnnnnnnnnnnnnnnnnnnnnnnnnnnnnnnnnnnnnnnnnnnnnnnnnnnnnnnnnnnnnnnnnnnnnnnnnnnnnnnnnnnnnnnnnnnnnnnnnnnnnnnnnnnnnnnnnnnnnnnnnnnnnnnnnnnnnnnnnnnnnnnnnnnnnnnnnnnnnnnnnnnnnnnnnnnnnnnnnnnnnnnnnnnnnnnnnnnnnnnnnnnnnnnnnnnnnnnnnnnnnnnnnnnnnnnnnnnnnnnnnnnnnnnnnnnnnnnnnnnnnnnnnnnnnnnnnnnnnnnnnnnnnnnnnnnnnnnnnnnnnnnnnnnnnnnnnnnnnnnnnnnnnnnnnnnnnnnnnnnnnnnnnnnnnnnnnnnnnnnnnnnnnnnnnnnnnnnnnnnnnnnnnnnnnnnnnnnnnnnnnnnnnnnnnnnnnnnnnnnnnnnnnnnnnnnnnnnnnnnnnnnnnnnnnnnnnnnnnnnnnnnnnnnnnnnnnnnnnnnnnnnnnnnnnnnnnnnnnnnnnnnnnnnnnnnnnnnnnnnnnnnnnnnnnnnnnnnnnnnnnnnnnnnnnnnnnnnnnnnnnnnnnnnnnnnnnnnnnnnnnnnnnnnnnnnnnnnnnnnnnnnnnnnnnnnnnnnnnnnnnnnnnnnnnnnnnnnnnnnnnnnnnnnnnnnnnnnnnnnnnnnnnnnnnnnnnnnnnnnnnnnnnnnnnnnnnnnnnnnnnnnnnnnnnnnnnnnnnnnnnnnnnnnnnnnnnnnnnnnnnnnnnnnnnnnnnnnnnnnnnnnnnnnnnnnnnnnnnnnnnnnnnnnnnnnnnnnnnnnnnnnnnnnnnnnnnnnnnnnnnnnnnnnnnnnnnnnnnnnnnnnnnnnnnnnnnnnnnnnnnnnnnnnnnnnnnnnnnnnnnnnnnnnnnnnnnnnnnnnnnnnnnnnnnnnnnnnnnnnnnnnnnnnnnnnnnnnnnnnnnnnnnnnnnnnnnnnnnnnnnnnnnnnnnnnnnnnnnnnnnnnnnnnnnnnnnnnnnnnnnnnnnnnnnnnnnnnnnnnnnnnnnnnnnnnnnnnnnnnnnnnnnnnnnnnnnnnnnnnnnnnnnnnnnnnnnnnnnnnnnnnnnnnnnnnnnnnnnnnnnnnnnnnnnnnnnnnnnnnnnnnnnnnnnnnnnnnnnnnnnnnnnnnnnnnnnnnnnnnnnnnnnnnnnnnnnnnnnnnnnnnnnnnnnnnnnnnnnnnnnnnnnnnnnnnnnnnnnnnnnnnnnnnnnnnnnnnnnnnnnnnnnnnnnnnnnnnnnnnnnnnnnnnnnnnnnnnnnnnnnnnnnnnnnnnnnnnnnnnnnnnnnnnnnnnnnnnnnnnnnnnnnnnnnnnnnnnnnnnnnnnnnnnnnnnnnnnnnnnnnnnnnnnnnnnnnnnnnnnnnnnnnnnnnnnnnnnnnnnnnnnnnnnnnnnnnnnnnnnnnnnnnnnnnnnnnnnnnnnnnnnnnnnnnnnnnnnnnnnnnnnnnnnnnnnnnnnnnnnnnnnnnnnnnnnnnnnnnnnnnnnnnnnnnnnnnnnnnnnnnnnnnnnnnnnnnnnnnnnnnnnnnnnnnnnnnnnnnnnnnnnnnnnnnnnnnnnnnnnnnnnnnnnnnnnnnnnnnnnnnnnnnnnnnnnnnnnnnnnnnnnnnnnnnnnnnnnnnnnnnnnnnnnnnnnnnnnnnnnnnnnnnnnnnnnnnnnnnnnnnnnnnnnnnnnnnnnnnnnnnnnnnnnnnnnnnnnnnnnnnnnnnnnnnnnnnnnnnnnnnnnnnnnnnnnnnnnnnnnnnnnnnnnnnnnnnnnnnnnnnnnnnnnnnnnnnnnnnnnnnnnnnnnnnnnnnnnnnnnnnnnnnnnnnnnnnnnnnnnnnnnnnnnnnnnnnnnnnnnnnnnnnnnnnnnnnnnnnnnnnnnnnnnnnnnnnnnnnnnnnnnnnnnnnnnnnnnnnnnnnnnnnnnnnnnnnnnnnnnnnnnnnnnnnnnnnnnnnnnnnnnnnnnnnnnnnnnnnnnnnnnnnnnnnnnnnnnnnnnnnnnnnnnnnnnnnnnnnnnnnnnnnnnnnnnnnnnnnnnnnnnnnnnnnnnnnnnnnnnnnnnnnnnnnnnnnnnnnnnnnnnnnnnnnnnnnnnnnnnnnnnnnnnnnnnnnnnnnnnnnnnnnnnnnnnnnnnnnnnnnnnnnnnnnnnnnnnnnnnnnnnnnnnnnnnnnnnnnnnnnnnnnnnnnnnnnnnnnnnnnnnnnnnnnnnnnnnnnnnnnnnnnnnnnnnnnnnnnnnnnnnnnnnnnnnnnnnnnnnnnnnnnnnnnnnnnnnnnnnnnnnnnnnnnnnnnnnnnnnnnnnnnnnnnnnnnnnnnnnnnnnnnnnnnnnnnnnnnnnnnnnnnnnnnnnnnnnnnnnnnnnnnnnnnnnnnnnnnnnnnnnnnnnnnnnnnnnnnnnnnnnnnnnnnnnnnnnnnnnnnnnnnnnnnnnnnnnnnnnnnnnnnnnnnnnnnnnnnnnnnnnnnnnnnnnnnnnnnnnnnnnnnnnnnnnnnnnnnnnnnnnnnnnnnnnnnnnnnnnnnnnnnnnnnnnnnnnnnnnnnnnnnnnnnnnnnnnnnnnnnnnnnnnnnnnnnnnnnnnnnnnnnnnnnnnnnnnnnnnnnnnnnnnnnnnnnnnnnnnnnnnnnnnnnnnnnnnnnnnnnnnnnnnnnnnnnnnnnnnnnnnnnnnnnnnnnnnnnnnnnnnnnnnnnnnnnnnnnnnnnnnnnnnnnnnnnnnnnnnnnnnnnnnnnnnnnnnnnnnnnnnnnnnnnnnnnnnnnnnnnnnnnnnnnnnnnnnnnnnnnnnnnnnnnnnnnnnnnnnnnnnnnnnnnnnnnnnnnnnnnnnnnnnnnnnnnnnnnnnnnnnnnnnnnnnnnnnnnnnnnnnnnnnnnnnnnnnnnnnnnnnnnnnnnnnnnnnnnnnnnnnnnnnnnnnnnnnnnnnnnnnnnnnnnnnnnnnnnnnnnnnnnnnnnnnnnnnnnnnnnnnnnnnnnnnnnnnnnnnnnnnnnnnnnnnnnnnnnnnnnnnnnnnnnnnnnnnnnnnnnnnnnnnnnnnnnnnnnnnnnnnnnnnnnnnnnnnnnnnnnnnnnnnnnnnnnnnnnnnnnnnnnnnnnnnnnnnnnnnnnnnnnnnnnnnnnnnnnnnnnnnnnnnnnnnnnnnnnnnnnnnnnnnnnnnnnnnnnnnnnnnnnnnnnnnnnnnnnnnnnnnnnnnnnnnnnnnnnnnnnnnnnnnnnnnnnnnnnnnnnnnnnnnnnnnnnnnnnnnnnnnnnnnnnnnnnnnnnnnnnnnnnnnnnnnnnnnnnnnnnnnnnnnnnnnnnnnnnnnnnnnnnnnnnnnnnnnnnnnnnnnnnnnnnnnnnnnnnnnnnnnnnnnnnnnnnnnnnnnnnnnnnnnnnnnnnnnnnnnnnnnnnnnnnnnnnnnnnnnnnnnnnnnnnnnnnnnnnnnnnnnnnnnnnnnnnnnnnnnnnnnnnnnnnnnnnnnnnnnnnnnnnnnnnnnnnnnnnnnnnnnnnnnnnnnnnnnnnnnnnnnnnnnnnnnnnnnnnnnnnnnnnnnnnnnnnnnnnnnnnnnnnnnnnnnnnnnnnnnnnnnnnnnnnnnnnnnnnnnnnnnnnnnnnnnnnnnnnnnnnnnnnnnnnnnnnnnnnnnnnnnnnnnnnnnnnnnnnnnnnnnnnnnnnnnnnnnnnnnnnnnnnnnnnnnnnnnnnnnnnnnnnnnnnnnnnnnnnnnnnnnnnnnnnnnnnnnnnnnnnnnnnnnnnnnnnnnnnnnnnnnnnnnnnnnnnnnnnnnnnnnnnnnnnnnnnnnnnnnnnnnnnnnnnnnnnnnnnnnnnnnnnnnnnnnnnnnnnnnnnnnnnnnnnnnnnnnnnnnnnnnnnnnnnnnnnnnnnnnnnnnnnnnnnnnnnnnnnnnnnnnnnnnnnnnnnnnnnnnnnnnnnnnnnnnnnnnnnnnnnnnnnnnnnnnnnnnnnnnnnnnnnnnnnnnnnnnnnnnnnnnnnnnnnnnnnnnnnnnnnnnnnnnnnnnnnnnnnnnnnnnnnnnnnnnnnnnnnnnnnnnnnnnnnnnnnnnnnnnnnnnnnnnnnnnnnnnnnnnnnnnnnnnnnnnnnnnnnnnnnnnnnnnnnnnnnnnnnnnnnnnnnnnnnnnnnnnnnnnnnnnnnnnnnnnnnnnnnnnnnnnnnnnnnnnnnnnnnnnnnnnnnnnnnnnnnnnnnnnnnnnnnnnnnnnnnnnnnnnnnnnnnnnnnnnnnnnnnnnnnnnnnnnnnnnnnnnnnnnnnnnnnnnnnnnnnnnnnnnnnnnnnnnnnnnnnnnnnnnnnnnnnnnnnnnnnnnnnnnnnnnnnnnnnnnnnnnnnnnnnnnnnnnnnnnnnnnnnnnnnnnnnnnnnnnnnnnnnnnnnnnnnnnnnnnnnnnnnnnnnnnnnnnnnnnnnnnnnnnnnnnnnnnnnnnnnnnnnnnnnnnnnnnnnnnnnnnnnnnnnnnnnnnnnnnnnnnnnnnnnnnnnnnnnnnnnnnnnnnnnnnnnnnnnnnnnnnnnnnnnnnnnnnnnnnnnnnnnnnnnnnnnnnnnnnnnnnnnnnnnnnnnnnnnnnnnnnnnnnnnnnnnnnnnnnnnnnnnnnnnnnnnnnnnnnnnnnnnnnnnnnnnnnnnnnnnnnnnnnnnnnnnnnnnnnnnnnnnnnnnnnnnnnnnnnnnnnnnnnnnnnnnnnnnnnnnnnnnnnnnnnnnnnnnnnnnnnnnnnnnnnnnnnnnnnnnnnnnnnnnnnnnnnnnnnnnnnnnnnnnnnnnnnnnnnnnnnnnnnnnnnnnnnnnnnnnnnnnnnnnnnnnnnnnnnnnnnnnnnnnnnnnnnnnnnnnnnnnnnnnnnnnnnnnnnnnnnnnnnnnnnnnnnnnnnnnnnnnnnnnnnnnnnnnnnnnnnnnnnnnnnnnnnnnnnnnnnnnnnnnnnnnnnnnnnnnnnnnnnnnnnnnnnnnnnnnnnnnnnnnnnnnnnnnnnnnnnnnnnnnnnnnnnnnnnnnnnnnnnnnnnnnnnnnnnnnnnnnnnnnnnnnnnnnnnnnnnnnnnnnnnnnnnnnnnnnnnnnnnnnnnnnnnnnnnnnnnnnnnnnnnnnnnnnnnnnnnnnnnnnnnnnnnnnnnnnnnnnnnnnnnnnnnnnnnnnnnnnnnnnnnnnnnnnnnnnnnnnnnnnnnnnnnnnnnnnnnnnnnnnnnnnnnnnnnnnnnnnnnnnnnnnnnnnnnnnnnnnnnnnnnnnnnnnnnnnnnnnnnnnnnnnnnnnnnnnnnnnnnnnnnnnnnnnnnnnnnnnnnnnnnnnnnnnnnnnnnnnnnnnnnnnnnnnnnnnnnnnnnnnnnnnnnnnnnnnnnnnnnnnnnnnnnnnnnnnnnnnnnnnnnnnnnnnnnnnnnnnnnnnnnnnnnnnnnnnnnnnnnnnnnnnnnnnnnnnnnnnnnnnnnnnnnnnnnnnnnnnnnnnnnnnnnnnnnnnnnnnnnnnnnnnnnnnnnnnnnnnnnnnnnnnnnnnnnnnnnnnnnnnnnnnnnnnnnnnnnnnnnnnnnnnnnnnnnnnnnnnnnnnnnnnnnnnnnnnnnnnnnnnnnnnnnnnnnnnnnnnnnnnnnnnnnnnnnnnnnnnnnnnnnnnnnnnnnnnnnnnnnnnnnnnnnnnnnnnnnnnnnnnnnnnnnnnnnnnnnnnnnnnnnnnnnnnnnnnnnnnnnnnnnnnnnnnnnnnnnnnnnnnnnnnnnnnnnnnnnnnnnnnnnnnnnnnnnnnnnnnnnnnnnnnnnnnnnnnnnnnnnnnnnnnnnnnnnnnnnnnnnnnnnnnnnnnnnnnnnnnnnnnnnnnnnnnnnnnnnnnnnnnnnnnnnnnnnnnnnnnnnnnnnnnnnnnnnnnnnnnnnnnnnnnnnnnnnnnnnnnnnnnnnnnnnnnnnnnnnnnnnnnnnnnnnnnnnnnnnnnnnnnnnnnnnnnnnnnnnnnnnnnnnnnnnnnnnnnnnnnnnnnnnnnnnnnnnnnnnnnnnnnnnnnnnnnnnnnnnnnnnnnnnnnnnnnnnnnnnnnnnnnnnnnnnnnnnnnnnnnnnnnnnnnnnnnnnnnnnnnnnnnnnnnnnnnnnnnnnnnnnnnnnnnnnnnnnnnnnnnnnnnnnnnnnnnnnnnnnnnnnnnnnnnnnnnnnnnnnnnnnnnnnnnnnnnnnnnnnnnnnnnnnnnnnnnnnnnnnnnnnnnnnnnnnnnnnnnnnnnnnnnnnnnnnnnnnnnnnnnnnnnnnnnnnnnnnnnnnnnnnnnnnnnnnnnnnnnnnnnnnnnnnnnnnnnnnnnnnnnnnnnnnnnnnnnnnnnnnnnnnnnnnnnnnnnnnnnnnnnnnnnnnnnnnnnnnnnnnnnnnnnnnnnnnnnnnnnnnnnnnnnnnnnnnnnnnnnnnnnnnnnnnnnnnnnnnnnnnnnnnnnnnnnnnnnnnnnnnnnnnnnnnnnnnnnnnnnnnnnnnnnnnnnnnnnnnnnnnnnnnnnnnnnnnnnnnnnnnnnnnnnnnnnnnnnnnnnnnnnnnnnnnnnnnnnnnnnnnnnnnnnnnnnnnnnnnnnnnnnnnnnnnnnnnnnnnnnnnnnnnnnnnnnnnnnnnnnnnnnnnnnnnnnnnnnnnnnnnnnnnnnnnnnnnnnnnnnnnnnnnnnnnnnnnnnnnnnnnnnnnnnnnnnnnnnnnnnnnnnnnnnnnnnnnnnnnnnnnnnnnnnnnnnnnnnnnnnnnnnnnnnnnnnnnnnnnnnnnnnnnnnnnnnnnnnnnnnnnnnnnnnnnnnnnnnnnnnnnnnnnnnnnnnnnnnnnnnnnnnnnnnnnnnnnnnnnnnnnnnnnnnnnnnnnnnnnnnnnnnnnnnnnnnnnnnnnnnnnnnnnnnnnnnnnnnnnnnnnnnnnnnnnnnnnnnnnnnnnnnnnnnnnnnnnnnnnnnnnnnnnnnnnnnnnnnnnnnnnnnnnnnnnnnnnnnnnnnnnnnnnnnnnnnnnnnnnnnnnnnnnnnnnnnnnnnnnnnnnnnnnnnnnnnnnnnnnnnnnnnnnnnnnnnnnnnnnnnnnnnnnnnnnnnnnnnnnnnnnnnnnnnnnnnnnnnnnnnnnnnnnnnnnnnnnnnnnnnnnnnnnnnnnnnnnnnnnnnnnnnnnnnnnnnnnnnnnnnnnnnnnnnnnnnnnnnnnnnnnnnnnnnnnnnnnnnnnnnnnnnnnnnnnnnnnnnnnnnnnnnnnnnnnnnnnnnnnnnnnnnnnnnnnnnnnnnnnnnnnnnnnnnnnnnnnnnnnnnnnnnnnnnnnnnnnnnnnnnnnnnnnnnnnnnnnnnnnnnnnnnnnnnnnnnnnnnnnnnnnnnnnnnnnnnnnnnnnnnnnnnnnnnnnnnnnnnnnnnnnnnnnnnnnnnnnnnnnnnnnnnnnnnnnnnnnnnnnnnnnnnnnnnnnnnnnnnnnnnnnnnnnnnnnnnnnnnnnnnnnnnnnnnnnnnnnnnnnnnnnnnnnnnnnnnnnnnnnnnnnnnnnnnnnnnnnnnnnnnnnnnnnnnnnnnnnnnnnnnnnnnnnnnnnnnnnnnnnnnnnnnnnnnnnnnnnnnnnnnnnnnnnnnnnnnnnnnnnnnnnnnnnnnnnnnnnnnnnnnnnnnnnnnnnnnnnnnnnnnnnnnnnnnnnnnnnnnnnnnnnnnnnnnnnnnnnnnnnnnnnnnnnnnnnnnnnnnnnnnnnnnnnnnnnnnnnnnnnnnnnnnnnnnnnnnnnnnnnnnnnnnnnnnnnnnnnnnnnnnnnnnnnnnnnnnnnnnnnnnnnnnnnnnnnnnnnnnnnnnnnnnnnnnnnnnnnnnnnnnnnnnnnnnnnnnnnnnnnnnnnnnnnnnnnnnnnnnnnnnnnnnnnnnnnnnnnnnnnnnnnnnnnnnnnnnnnnnnnnnnnnnnnnnnnnnnnnnnnnnnnnnnnnnnnnnnnnnnnnnnnnnnnnnnnnnnnnnnnnnnnnnnnnnnnnnnnnnnnnnnnnnnnnnnnnnnnnnnnnnnnnnnnnnnnnnnnnnnnnnnnnnnnnnnnnnnnnnnnnnnnnnnnnnnnnnnnnnnnnnnnnnnnnnnnnnnnnnnnnnnnnnnnnnnnnnnnnnnnnnnnnnnnnnnnnnnnnnnnnnnnnnnnnnnnnnnnnnnnnnnnnnnnnnnnnnnnnnnnnnnnnnnnnnnnnnnnnnnnnnnnnnnnnnnnnnnnnnnnnnnnnnnnnnnnnnnnnnnnnnnnnnnnnnnnnnnnnnnnnnnnnnnnnnnnnnnnnnnnnnnnnnnnnnnnnnnnnnnnnnnnnnnnnnnnnnnnnnnnnnnnnnnnnnnnnnnnnnnnnnnnnnnnnnnnnnnnnnnnnnnnnnnnnnnnnnnnnnnnnnnnnnnnnnnnnnnnnnnnnnnnnnnnnnnnnnnnnnnnnnnnnnnnnnnnnnnnnnnnnnnnnnnnnnnnnnnnnnnnnnnnnnnnnnnnnnnnnnnnnnnnnnnnnnnnnnnnnnnnnnnnnnnnnnnnnnnnnnnnnnnnnnnnnnnnnnnnnnnnnnnnnnnnnnnnnnnnnnnnnnnnnnnnnnnnnnnnnnnnnnnnnnnnnnnnnnnnnnnnnnnnnnnnnnnnnnnnnnnnnnnnnnnnnnnnnnnnnnnnnnnnnnnnnnnnnnnnnnnnnnnnnnnnnnnnnnnnnnnnnnnnnnnnnnnnnnnnnnnnnnnnnnnnnnnnnnnnnnnnnnnnnnnnnnnnnnnnnnnnnnnnnnnnnnnnnnnnnnnnnnnnnnnnnnnnnnnnnnnnnnnnnnnnnnnnnnnnnnnnnnnnnnnnnnnnnnnnnnnnnnnnnnnnnnnnnnnnnnnnnnnnnnnnnnnnnnnnnnnnnnnnnnnnnnnnnnnnnnnnnnnnnnnnnnnnnnnnnnnnnnnnnnnnnnnnnnnnnnnnnnnnnnnnnnnnnnnnnnnnnnnnnnnnnnnnnnnnnnnnnnnnnnnnnnnnnnnnnnnnnnnnnnnnnnnnnnnnnnnnnnnnnnnnnnnnnnnnnnnnnnnnnnnnnnnnnnnnnnnnnnnnnnnnnnnnnnnnnnnnnnnnnnnnnnnnnnnnnnnnnnnnnnnnnnnnnnnnnnnnnnnnnnnnnnnnnnnnnnnnnnnnnnnnnnnnnnnnnnnnnnnnnnnnnnnnnnnnnnnnnnnnnnnnnnnnnnnnnnnnnnnnnnnnnnnnnnnnnnnnnnnnnnnnnnnnnnnnnnnnnnnnnnnnnnnnnnnnnnnnnnnnnnnnnnnnnnnnnnnnnnnnnnnnnnnnnnnnnnnnnnnnnnnnnnnnnnnnnnnnnnnnnnnnnnnnnnnnnnnnnnnnnnnnnnnnnnnnnnnnnnnnnnnnnnnnnnnnnnnnnnnnnnnnnnnnnnnnnnnnnnnnnnnnnnnnnnnnnnnnnnnnnnnnnnnnnnnnnnnnnnnnnnnnnnnnnnnnnnnnnnnnnnnnnnnnnnnnnnnnnnnnnnnnnnnnnnnnnnnnnnnnnnnnnnnnnnnnnnnnnnnnnnnnnnnnnnnnnnnnnnnnnnnnnnnnnnnnnnnnnnnnnnnnnnnnnnnnnnnnnnnnnnnnnnnnnnnnnnnnnnnnnnnnnnnnnnnnnnnnnnnnnnnnnnnnnnnnnnnnnnnnnnnnnnnnnnnnnnnnnnnnnnnnnnnnnnnnnnnnnnnnnnnnnnnnnnnnnnnnnnnnnnnnnnnnnnnnnnnnnnnnnnnnnnnnnnnnnnnnnnnnnnnnnnnnnnnnnnnnnnnnnnnnnnnnnnnnnnnnnnnnnnnnnnnnnnnnnnnnnnnnnnnnnnnnnnnnnnnnnnnnnnnnnnnnnnnnnnnnnnnnnnnnnnnnnnnnnnnnnnnnnnnnnnnnnnnnnnnnnnnnnnnnnnnnnnnnnnnnnnnnnnnnnnnnnnnnnnnnnnnnnnnnnnnnnnnnnnnnnnnnnnnnnnnnnnnnnnnnnnnnnnnnnnnnnnnnnnnnnnnnnnnnnnnnnnnnnnnnnnnnnnnnnnnnnnnnnnnnnnnnnnnnnnnnnnnnnnnnnnnnnnnnnnnnnnnnnnnnnnnnnnnnnnnnnnnnnnnnnnnnnnnnnnnnnnnnnnnnnnnnnnnnnnnnnnnnnnnnnnnnnnnnnnnnnnnnnnnnnnnnnnnnnnnnnnnnnnnnnnnnnnnnnnnnnnnnnnnnnnnnnnnnnnnnnnnnnnnnnnnnnnnnnnnnnnnnnnnnnnnnnnnnnnnnnnnnnnnnnnnnnnnnnnnnnnnnnnnnnnnnnnnnnnnnnnnnnnnnnnnnnnnnnnnnnnnnnnnnnnnnnnnnnnnnnnnnnnnnnnnnnnnnnnnnnnnnnnnnnnnnnnnnnnnnnnnnnnnnnnnnnnnnnnnnnnnnnnnnnnnnnnnnnnnnnnnnnnnnnnnnnnnnnnnnnnnnnnnnnnnnnnnnnnnnnnnnnnnnnnnnnnnnnnnnnnnnnnnnnnnnnnnnnnnnnnnnnnnnnnnnnnnnnnnnnnnnnnnnnnnnnnnnnnnnnnnnnnnnnnnnnnnnnnnnnnnnnnnnnnnnnnnnnnnnnnnnnnnnnnnnnnnnnnnnnnnnnnnnnnnnnnnnnnnnnnnnnnnnnnnnnnnnnnnnnnnnnnnnnnnnnnnnnnnnnnnnnnnnnnnnnnnnnnnnnnnnnnnnnnnnnnnnnnnnnnnnnnnnnnnnnnnnnnnnnnnnnnnnnnnnnnnnnnnnnnnnnnnnnnnnnnnnnnnnnnnnnnnnnnnnnnnnnnnnnnnnnnnnnnnnnnnnnnnnnnnnnnnnnnnnnnnnnnnnnnnnnnnnnnnnnnnnnnnnnnnnnnnnnnnnnnnnnnnnnnnnnnnnnnnnnnnnnnnnnnnnnnnnnnnnnnnnnnnnnnnnnnnnnnnnnnnnnnnnnnnnnnnnnnnnnnnnnnnnnnnnnnnnnnnnnnnnnnnnnnnnnnnnnnnnnnnnnnnnnnnnnnnnnnnnnnnnnnnnnnnnnnnnnnnnnnnnnnnnnnnnnnnnnnnnnnnnnnnnnnnnnnnnnnnnnnnnnnnnnnnnnnnnnnnnnnnnnnnnnnnnnnnnnnnnnnnnnnnnnnnnnnnnnnnnnnnnnnnnnnnnnnnnnnnnnnnnnnnnnnnnnnnnnnnnnnnnnnnnnnnnnnnnnnnnnnnnnnnnnnnnnnnnnnnnnnnnnnnnnnnnnnnnnnnnnnnnnnnnnnnnnnnnnnnnnnnnnnnnnnnnnnnnnnnnnnnnnnnnnnnnnnnnnnnnnnnnnnnnnnnnnnnnnnnnnnnnnnnnnnnnnnnnnnnnnnnnnnnnnnnnnnnnnnnnnnnnnnnnnnnnnnnnnnnnnnnnnnnnnnnnnnnnnnnnnnnnnnnnnnnnnnnnnnnnnnnnnnnnnnnnnnnnnnnnnnnnnnnnnnnnnnnnnnnnnnnnnnnnnnnnnnnnnnnnnnnnnnnnnnnnnnnnnnnnnnnnnnnnnnnnnnnnnnnnnnnnnnnnnnnnnnnnnnnnnnnnnnnnnnnnnnnnnnnnnnnnnnnnnnnnnnnnnnnnnnnnnnnnnnnnnnnnnnnnnnnnnnnnnnnnnnnnnnnnnnnnnnnnnnnnnnnnnnnnnnnnnnnnnnnnnnnnnnnnnnnnnnnnnnnnnnnnnnnnnnnnnnnnnnnnnnnnnnnnnnnnnnnnnnnnnnnnnnnnnnnnnnnnnnnnnnnnnnnnnnnnnnnnnnnnnnnnnnnnnnnnnnnnnnnnnnnnnnnnnnnnnnnnnnnnnnnnnnnnnnnnnnnnnnnnnnnnnnnnnnnnnnnnnnnnnnnnnnnnnnnnnnnnnnnnnnnnnnnnnnnnnnnnnnnnnnnnnnnnnnnnnnnnnnnnnnnnnnnnnnnnnnnnnnnnnnnnnnnnnnnnnnnnnnnnnnnnnnnnnnnnnnnnnnnnnnnnnnnnnnnnnnnnnnnnnnnnnnnnnnnnnnnnnnnnnnnnnnnnnnnnnnnnnnnnnnnnnnnnnnnnnnnnnnnnnnnnnnnnnnnnnnnnnnnnnnnnnnnnnnnnnnnnnnnnnnnnnnnnnnnnnnnnnnnnnnnnnnnnnnnnnnnnnnnnnnnnnnnnnnnnnnnnnnnnnnnnnnnnnnnnnnnnnnnnnnnnnnnnnnnnnnnnnnnnnnnnnnnnnnnnnnnnnnnnnnnnnnnnnnnnnnnnnnnnnnnnnnnnnnnnnnnnnnnnnnnnnnnnnnnnnnnnnnnnnnnnnnnnnnnnnnnnnnnnnnnnnnnnnnnnnnnnnnnnnnnnnnnnnnnnnnnnnnnnnnnnnnnnnnnnnnnnnnnnnnnnnnnnnnnnnnnnnnnnnnnnnnnnnnnnnnnnnnnnnnnnnnnnnnnnnnnnnnnnnnnnnnnnnnnnnnnnnnnnnnnnnnnnnnnnnnnnnnnnnnnnnnnnnnnnnnnnnnnnnnnnnnnnnnnnnnnnnnnnnnnnnnnnnnnnnnnnnnnnnnnnnnnnnnnnnnnnnnnnnnnnnnnnnnnnnnnnnnnnnnnnnnnnnnnnnnnnnnnnnnnnnnnnnnnnnnnnnnnnnnnnnnnnnnnnnnnnnnnnnnnnnnnnnnnnnnnnnnnnnnnnnnnnnnnnnnnnnnnnnnnnnnnnnnnnnnnnnnnnnnnnnnnnnnnnnnnnnnnnnnnnnnnnnnnnnnnnnnnnnnnnnnnnnnnnnnnnnnnnnnnnnnnnnnnnnnnnnnnnnnnnnnnnnnnnnnnnnnnnnnnnnnnnnnnnnnnnnnnnnnnnnnnnnnnnnnnnnnnnnnnnnnnnnnnnnnnnnnnnnnnnnnnnnnnnnnnnnnnnnnnnnnnnnnnnnnnnnnnnnnnnnnnnnnnnnnnnnnnnnnnnnnnnnnnnnnnnnnnnnnnnnnnnnnnnnnnnnnnnnnnnnnnnnnnnnnnnnnnnnnnnnnnnnnnnnnnnnnnnnnnnnnnnnnnnnnnnnnnnnnnnnnnnnnnnnnnnnnnnnnnnnnnnnnnnnnnnnnnnnnnnnnnnnnnnnnnnnnnnnnnnnnnnnnnnnnnnnnnnnnnnnnnnnnnnnnnnnnnnnnnnnnnnnnnnnnnnnnnnnnnnnnnnnnnnnnnnnnnnnnnnnnnnnnnnnnnnnnnnnnnnnnnnnnnnnnnnnnnnnnnnnnnnnnnnnnnnnnnnnnnnnnnnnnnnnnnnnnnnnnnnnnnnnnnnnnnnnnnnnnnnnnnnnnnnnnnnnnnnnnnnnnnnnnnnnnnnnnnnnnnnnnnnnnnnnnnnnnnnnnnnnnnnnnnnnnnnnnnnnnnnnnnnnnnnnnnnnnnnnnnnnnnnnnnnnnnnnnnnnnnnnnnnnnnnnnnnnnnnnnnnnnnnnnnnnnnnnnnnnnnnnnnnnnnnnnnnnnnnnnnnnnnnnnnnnnnnnnnnnnnnnnnnnnnnnnnnnnnnnnnnnnnnnnnnnnnnnnnnnnnnnnnnnnnnnnnnnnnnnnnnnnnnnnnnnnnnnnnnnnnnnnnnnnnnnnnnnnnnnnnnnnnnnnnnnnnnnnnnnnnnnnnnnnnnnnnnnnnnnnnnnnnnnnnnnnnnnnnnnnnnnnnnnnnnnnnnnnnnnnnnnnnnnnnnnnnnnnnnnnnnnnnnnnnnnnnnnnnnnnnnnnnnnnnnnnnnnnnnnnnnnnnnnnnnnnnnnnnnnnnnnnnnnnnnnnnnnnnnnnnnnnnnnnnnnnnnnnnnnnnnnnnnnnnnnnnnnnnnnnnnnnnnnnnnnnnnnnnnnnnnnnnnnnnnnnnnnnnnnnnnnnnnnnnnnnnnnnnnnnnnnnnnnnnnnnnnnnnnnnnnnnnnnnnnnnnnnnnnnnnnnnnnnnnnnnnnnnnnnnnnnnnnnnnnnnnnnnnnnnnnnnnnnnnnnnnnnnnnnnnnnnnnnnnnnnnnnnnnnnnnnnnnnnnnnnnnnnnnnnnnnnnnnnnnnnnnnnnnnnnnnnnnnnnnnnnnnnnnnnnnnnnnnnnnnnnnnnnnnnnnnnnnnnnnnnnnnnnnnnnnnnnnnnnnnnnnnnnnnnnnnnnnnnnnnnnnnnnnnnnnnnnnnnnnnnnnnnnnnnnnnnnnnnnnnnnnnnnnnnnnnnnnnnnnnnnnnnnnnnnnnnnnnnnnnnnnnnnnnnnnnnnnnnnnnnnnnnnnnnnnnnnnnnnnnnnnnnnnnnnnnnnnnnnnnnnnnnnnnnnnnnnnnnnnnnnnnnnnnnnnnnnnnnnnnnnnnnnnnnnnnnnnnnnnnnnnnnnnnnnnnnnnnnnnnnnnnnnnnnnnnnnnnnnnnnnnnnnnnnnnnnnnnnnnnnnnnnnnnnnnnnnnnnnnnnnnnnnnnnnnnnnnnnnnnnnnnnnnnnnnnnnnnnnnnnnnnnnnnnnnnnnnnnnnnnnnnnnnnnnnnnnnnnnnnnnnnnnnnnnnnnnnnnnnnnnnnnnnnnnnnnnnnnnnnnnnnnnnnnnnnnnnnnnnnnnnnnnnnnnnnnnnnnnnnnnnnnnnnnnnnnnnnnnnnnnnnnnnnnnnnnnnnnnnnnnnnnnnnnnnnnnnnnnnnnnnnnnnnnnnnnnnnnnnnnnnnnnnnnnnnnnnnnnnnnnnnnnnnnnnnnnnnnnnnnnnnnnnnnnnnnnnnnnnnnnnnnnnnnnnnnnnnnnnnnnnnnnnnnnnnnnnnnnnnnnnnnnnnnnnnnnnnnnnnnnnnnnnnnnnnnnnnnnnnnnnnnnnnnnnnnnnnnnnnnnnnnnnnnnnnnnnnnnnnnnnnnnnnnnnnnnnnnnnnnnnnnnnnnnnnnnnnnnnnnnnnnnnnnnnnnnnnnnnnnnnnnnnnnnnnnnnnnnnnnnnnnnnnnnnnnnnnnnnnnnnnnnnnnnnnnnnnnnnnnnnnnnnnnnnnnnnnnnnnnnnnnnnnnnnnnnnnnnnnnnnnnnnnnnnnnnnnnnnnnnnnnnnnnnnnnnnnnnnnnnnnnnnnnnnnnnnnnnnnnnnnnnnnnnnnnnnnnnnnnnnnnnnnnnnnnnnnnnnnnnnnnnnnnnnnnnnnnnnnnnnnnnnnnnnnnnnnnnnnnnnnnnnnnnnnnnnnnnnnnnnnnnnnnnnnnnnnnnnnnnnnnnnnnnnnnnnnnnnnnnnnnnnnnnnnnnnnnnnnnnnnnnnnnnnnnnnnnnnnnnnnnnnnnnnnnnnnnnnnnnnnnnnnnnnnnnnnnnnnnnnnnnnnnnnnnnnnnnnnnnnnnnnnnnnnnnnnnnnnnnnnnnnnnnnnnnnnnnnnnnnnnnnnnnnnnnnnnnnnnnnnnnnnnnnnnnnnnnnnnnnnnnnnnnnnnnnnnnnnnnnnnnnnnnnnnnnnnnnnnnnnnnnnnnnnnnnnnnnnnnnnnnnnnnnnnnnnnnnnnnnnnnnnnnnnnnnnnnnnnnnnnnnnnnnnnnnnnnnnnnnnnnnnnnnnnnnnnnnnnnnnnnnnnnnnnnnnnnnnnnnnnnnnnnnnnnnnnnnnnnnnnnnnnnnnnnnnnnnnnnnnnnnnnnnnnnnnnnnnnnnnnnnnnnnnnnnnnnnnnnnnnnnnnnnnnnnnnnnnnnnnnnnnnnnnnnnnnnnnnnnnnnnnnnnnnnnnnnnnnnnnnnnnnnnnnnnnnnnnnnnnnnnnnnnnnnnnnnnnnnnnnnnnnnnnnnnnnnnnnnnnnnnnnnnnnnnnnnnnnnnnnnnnnnnnnnnnnnnnnnnnnnnnnnnnnnnnnnnnnnnnnnnnnnnnnnnnnnnnnnnnnnnnnnnnnnnnnnnnnnnnnnnnnnnnnnnnnnnnnnnnnnnnnnnnnnnnnnnnnnnnnnnnnnnnnnnnnnnnnnnnnnnnnnnnnnnnnnnnnnnnnnnnnnnnnnnnnnnnnnnnnnnnnnnnnnnnnnnnnnnnnnnnnnnnnnnnnnnnnnnnnnnnnnnnnnnnnnnnnnnnnnnnnnnnnnnnnnnnnnnnnnnnnnnnnnnnnnnnnnnnnnnnnnnnnnnnnnnnnnnnnnnnnnnnnnnnnnnnnnnnnnnnnnnnnnnnnnnnnnnnnnnnnnnnnnnnnnnnnnnnnnnnnnnnnnnnnnnnnnnnnnnnnnnnnnnnnnnnnnnnnnnnnnnnnnnnnnnnnnnnnnnnnnnnnnnnnnnnnnnnnnnnnnnnnnnnnnnnnnnnnnnnnnnnnnnnnnnnnnnnnnnnnnnnnnnnnnnnnnnnnnnnnnnnnnnnnnnnnnnnnnnnnnnnnnnnnnnnnnnnnnnnnnnnnnnnnnnnnnnnnnnnnnnnnnnnnnnnnnnnnnnnnnnnnnnnnnnnnnnnnnnnnnnnnnnnnnnnnnnnnnnnnnnnnnnnnnnnnnnnnnnnnnnnnnnnnnnnnnnnnnnnnnnnnnnnnnnnnnnnnnnnnnnnnnnnnnnnnnnnnnnnnnnnnnnnnnnnnnnnnnnnnnnnnnnnnnnnnnnnnnnnnnnnnnnnnnnnnnnnnnnnnnnnnnnnnnnnnnnnnnnnnnnnnnnnnnnnnnnnnnnnnnnnnnnnnnnnnnnnnnnnnnnnnnnnnnnnnnnnnnnnnnnnnnnnnnnnnnnnnnnnnnnnnnnnnnnnnnnnnnnnnnnnnnnnnnnnnnnnnnnnnnnnnnnnnnnnnnnnnnnnnnnnnnnnnnnnnnnnnnnnnnnnnnnnnnnnnnnnnnnnnnnnnnnnnnnnnnnnnnnnnnnnnnnnnnnnnnnnnnnnnnnnnnnnnnnnnnnnnnnnnnnnnnnnnnnnnnnnnnnnnnnnnnnnnnnnnnnnnnnnnnnnnnnnnnnnnnnnnnnnnnnnnnnnnnnnnnnnnnnnnnnnnnnnnnnnnnnnnnnnnnnnnnnnnnnnnnnnnnnnnnnnnnnnnnnnnnnnnnnnnnnnnnnnnnnnnnnnnnnnnnnnnnnnnnnnnnnnnnnnnnnnnnnnnnnnnnnnnnnnnnnnnnnnnnnnnnnnnnnnnnnnnnnnnnnnnnnnnnnnnnnnnnnnnnnnnnnnnnnnnnnnnnnnnnnnnnnnnnnnnnnnnnnnnnnnnnnnnnnnnnnnnnnnnnnnnnnnnnnnnnnnnnnnnnnnnnnnnnnnnnnnnnnnnnnnnnnnnnnnnnnnnnnnnnnnnnnnnnnnnnnnnnnnnnnnnnnnnnnnnnnnnnnnnnnnnnnnnnnnnnnnnnnnnnnnnnnnnnnnnnnnnnnnnnnnnnnnnnnnnnnnnnnnnnnnnnnnnnnnnnnnnnnnnnnnnnnnnnnnnnnnnnnnnnnnnnnnnnnnnnnnnnnnnnnnnnnnnnnnnnnnnnnnnnnnnnnnnnnnnnnnnnnnnnnnnnnnnnnnnnnnnnnnnnnnnnnnnnnnnnnnnnnnnnnnnnnnnnnnnnnnnnnnnnnnnnnnnnnnnnnnnnnnnnnnnnnnnnnnnnnnnnnnnnnnnnnnnnnnnnnnnnnnnnnnnnnnnnnnnnnnnnnnnnnnnnnnnnnnnnnnnnnnnnnnnnnnnnnnnnnnnnnnnnnnnnnnnnnnnnnnnnnnnnnnnnnnnnnnnnnnnnnnnnnnnnnnnnnnnnnnnnnnnnnnnnnnnnnnnnnnnnnnnnnnnnnnnnnnnnnnnnnnnnnnnnnnnnnnnnnnnnnnnnnnnnnnnnnnnnnnnnnnnnnnnnnnnnnnnnnnnnnnnnnnnnnnnnnnnnnnnnnnnnnnnnnnnnnnnnnnnnnnnnnnnnnnnnnnnnnnnnnnnnnnnnnnnnnnnnnnnnnnnnnnnnnnnnnnnnnnnnnnnnnnnnnnnnnnnnnnnnnnnnnnnnnnnnnnnnnnnnnnnnnnnnnnnnnnnnnnnnnnnnnnnnnnnnnnnnnnnnnnnnnnnnnnnnnnnnnnnnnnnnnnnnnnnnnnnnnnnnnnnnnnnnnnnnnnnnnnnnnnnnnnnnnnnnnnnnnnnnnnnnnnnnnnnnnnnnnnnnnnnnnnnnnnnnnnnnnnnnnnnnnnnnnnnnnnnnnnnnnnnnnnnnnnnnnnnnnnnnnnnnnnnnnnnnnnnnnnnnnnnnnnnnnnnnnnnnnnnnnnnnnnnnnnnnnnnnnnnnnnnnnnnnnnnnnnnnnnnnnnnnnnnnnnnnnnnnnnnnnnnnnnnnnnnnnnnnnnnnnnnnnnnnnnnnnnnnnnnnnnnnnnnnnnnnnnnnnnnnnnnnnnnnnnnnnnnnnnnnnnnnnnnnnnnnnnnnnnnnnnnnnnnnnnnnnnnnnnnnnnnnnnnnnnnnnnnnnnnnnnnnnnnnnnnnnnnnnnnnnnnnnnnnnnnnnnnnnnnnnnnnnnnnnnnnnnnnnnnnnnnnnnnnnnnnnnnnnnnnnnnnnnnnnnnnnnnnnnnnnnnnnnnnnnnnnnnnnnnnnnnnnnnnnnnnnnnnnnnnnnnnnnnnnnnnnnnnnnnnnnnnnnnnnnnnnnnnnnnnnnnnnnnnnnnnnnnnnnnnnnnnnnnnnnnnnnnnnnnnnnnnnnnnnnnnnnnnnnnnnnnnnnnnnnnnnnnnnnnnnnnnnnnnnnnnnnnnnnnnnnnnnnnnnnnnnnnnnnnnnnnnnnnnnnnnnnnnnnnnnnnnnnnnnnnnnnnnnnnnnnnnnnnnnnnnnnnnnnnnnnnnnnnnnnnnnnnnnnnnnnnnnnnnnnnnnnnnnnnnnnnnnnnnnnnnnnnnnnnnnnnnnnnnnnnnnnnnnnnnnnnnnnnnnnnnnnnnnnnnnnnnnnnnnnnnnnnnnnnnnnnnnnnnnnnnnnnnnnnnnnnnnnnnnnnnnnnnnnnnnnnnnnnnnnnnnnnnnnnnnnnnnnnnnnnnnnnnnnnnnnnnnnnnnnnnnnnnnnnnnnnnnnnnnnnnnnnnnnnnnnnnnnnnnnnnnnnnnnnnnnnnnnnnnnnnnnnnnnnnnnnnnnnnnnnnnnnnnnnnnnnnnnnnnnnnnnnnnnnnnnnnnnnnnnnnnnnnnnnnnnnnnnnnnnnnnnnnnnnnnnnnnnnnnnnnnnnnnnnnnnnnnnnnnnnnnnnnnnnnnnnnnnnnnnnnnnnnnnnnnnnnnnnnnnnnnnnnnnnnnnnnnnnnnnnnnnnnnnnnnnnnnnnnnnnnnnnnnnnnnnnnnnnnnnnnnnnnnnnnnnnnnnnnnnnnnnnnnnnnnnnnnnnnnnnnnnnnnnnnnnnnnnnnnnnnnnnnnnnnnnnnnnnnnnnnnnnnnnnnnnnnnnnnnnnnnnnnnnnnnnnnnnnnnnnnnnnnnnnnnnnnnnnnnnnnnnnnnnnnnnnnnnnnnnnnnnnnnnnnnnnnnnnnnnnnnnnnnnnnnnnnnnnnnnnnnnnnnnnnnnnnnnnnnnnnnnnnnnnnnnnnnnnnnnnnnnnnnnnnnnnnnnnnnnnnnnnnnnnnnnnnnnnnnnnnnnnnnnnnnnnnnnnnnnnnnnnnnnnnnnnnnnnnnnnnnnnnnnnnnnnnnnnnnnnnnnnnnnnnnnnnnnnnnnnnnnnnnnnnnnnnnnnnnnnnnnnnnnnnnnnnnnnnnnnnnnnnnnnnnnnnnnnnnnnnnnnnnnnnnnnnnnnnnnnnnnnnnnnnnnnnnnnnnnnnnnnnnnnnnnnnnnnnnnnnnnnnnnnnnnnnnnnnnnnnnnnnnnnnnnnnnnnnnnnnnnnnnnnnnnnnnnnnnnnnnnnnnnnnnnnnnnnnnnnnnnnnnnnnnnnnnnnnnnnnnnnnnnnnnnnnnnnnnnnnnnnnnnnnnnnnnnnnnnnnnnnnnnnnnnnnnnnnnnnnnnnnnnnnnnnnnnnnnnnnnnnnnnnnnnnnnnnnnnnnnnnnnnnnnnnnnnnnnnnnnnnnnnnnnnnnnnnnnnnnnnnnnnnnnnnnnnnnnnnnnnnnnnnnnnnnnnnnnnnnnnnnnnnnnnnnnnnnnnnnnnnnnnnnnnnnnnnnnnnnnnnnnnnnnnnnnnnnnnnnnnnnnnnnnnnnnnnnnnnnnnnnnnnnnnnnnnnnnnnnnnnnnnnnnnnnnnnnnnnnnnnnnnnnnnnnnnnnnnnnnnnnnnnnnnnnnnnnnnnnnnnnnnnnnnnnnnnnnnnnnnnnnnnnnnnnnnnnnnnnnnnnnnnnnnnnnnnnnnnnnnnnnnnnnnnnnnnnnnnnnnnnnnnnnnnnnnnnnnnnnnnnnnnnnnnnnnnnnnnnnnnnnnnnnnnnnnnnnnnnnnnnnnnnnnnnnnnnnnnnnnnnnnnnnnnnnnnnnnnnnnnnnnnnnnnnnnnnnnnnnnnnnnnnnnnnnnnnnnnnnnnnnnnnnnnnnnnnnnnnnnnnnnnnnnnnnnnnnnnnnnnnnnnnnnnnnnnnnnnnnnnnnnnnnnnnnnnnnnnnnnnnnnnnnnnnnnnnnnnnnnnnnnnnnnnnnnnnnnnnnnnnnnnnnnnnnnnnnnnnnnnnnnnnnnnnnnnnnnnnnnnnnnnnnnnnnnnnnnnnnnnnnnnnnnnnnnnnnnnnnnnnnnnnnnnnnnnnnnnnnnnnnnnnnnnnnnnnnnnnnnnnnnnnnnnnnnnnnnnnnnnnnnnnnnnnnnnnnnnnnnnnnnnnnnnnnnnnnnnnnnnnnnnnnnnnnnnnnnnnnnnnnnnnnnnnnnnnnnnnnnnnnnnnnnnnnnnnnnnnnnnnnnnnnnnnnnnnnnnnnnnnnnnnnnnnnnnnnnnnnnnnnnnnnnnnnnnnnnnnnnnnnnnnnnnnnnnnnnnnnnnnnnnnnnnnnnnnnnnnnnnnnnnnnnnnnnnnnnnnnnnnnnnnnnnnnnnnnnnnnnnnnnnnnnnnnnnnnnnnnnnnnnnnnnnnnnnnnnnnnnnnnnnnnnnnnnnnnnnnnnnnnnnnnnnnnnnnnnnnnnnnnnnnnnnnnnnnnnnnnnnnnnnnnnnnnnnnnnnnnnnnnnnnnnnnnnnnnnnnnnnnnnnnnnnnnnnnnnnnnnnnnnnnnnnnnnnnnnnnnnnnnnnnnnnnnnnnnnnnnnnnnnnnnnnnnnnnnnnnnnnnnnnnnnnnnnnnnnnnnnnnnnnnnnnnnnnnnnnnnnnnnnnnnnnnnnnnnnnnnnnnnnnnnnnnnnnnnnnnnnnnnnnnnnnnnnnnnnnnnnnnnnnnnnnnnnnnnnnnnnnnnnnnnnnnnnnnnnnnnnnnnnnnnnnnnnnnnnnnnnnnnnnnnnnnnnnnnnnnnnnnnnnnnnnnnnnnnnnnnnnnnnnnnnnnnnnnnnnnnnnnnnnnnnnnnnnnnnnnnnnnnnnnnnnnnnnnnnnnnnnnnnnnnnnnnnnnnnnnnnnnnnnnnnnnnnnnnnnnnnnnnnnnnnnnnnnnnnnnnnnnnnnnnnnnnnnnnnnnnnnnnnnnnnnnnnnnnnnnnnnnnnnnnnnnnnnnnnnnnnnnnnnnnnnnnnnnnnnnnnnnnnnnnnnnnnnnnnnnnnnnnnnnnnnnnnnnnnnnnnnnnnnnnnnnnnnnnnnnnnnnnnnnnnnnnnnnnnnnnnnnnnnnnnnnnnnnnnnnnnnnnnnnnnnnnnnnnnnnnnnnnnnnnnnnnnnnnnnnnnnnnnnnnnnnnnnnnnnnnnnnnnnnnnnnnnnnnnnnnnnnnnnnnnnnnnnnnnnnnnnnnnnnnnnnnnnnnnnnnnnnnnnnnnnnnnnnnnnnnnnnnnnnnnnnnnnnnnnnnnnnnnnnnnnnnnnnnnnnnnnnnnnnnnnnnnnnnnnnnnnnnnnnnnnnnnnnnnnnnnnnnnnnnnnnnnnnnnnnnnnnnnnnnnnnnnnnnnnnnnnnnnnnnnnnnnnnnnnnnnnnnnnnnnnnnnnnnnnnnnnnnnnnnnnnnnnnnnnnnnnnnnnnnnnnnnnnnnnnnnnnnnnnnnnnnnnnnnnnnnnnnnnnnnnnnnnnnnnnnnnnnnnnnnnnnnnnnnnnnnnnnnnnnnnnnnnnnnnnnnnnnnnnnnnnnnnnnnnnnnnnnnnnnnnnnnnnnnnnnnnnnnnnnnnnnnnnnnnnnnnnnnnnnnnnnnnnnnnnnnnnnnnnnnnnnnnnnnnnnnnnnnnnnnnnnnnnnnnnnnnnnnnnnnnnnnnnnnnnnnnnnnnnnnnnnnnnnnnnnnnnnnnnnnnnnnnnnnnnnnnnnnnnnnnnnnnnnnnnnnnnnnnnnnnnnnnnnnnnnnnnnnnnnnnnnnnnnnnnnnnnnnnnnnnnnnnnnnnnnnnnnnnnnnnnnnnnnnnnnnnnnnnnnnnnnnnnnnnnnnnnnnnnnnnnnnnnnnnnnnnnnnnnnnnnnnnnnnnnnnnnnnnnnnnnnnnnnnnnnnnnnnnnnnnnnnnnnnnnnnnnnnnnnnnnnnnnnnnnnnnnnnnnnnnnnnnnnnnnnnnnnnnnnnnnnnnnnnnnnnnnnnnnnnnnnnnnnnnnnnnnnnnnnnnnnnnnnnnnnnnnnnnnnnnnnnnnnnnnnnnnnnnnnnnnnnnnnnnnnnnnnnnnnnnnnnnnnnnnnnnnnnnnnnnnnnnnnnnnnnnnnnnnnnnnnnnnnnnnnnnnnnnnnnnnnnnnnnnnnnnnnnnnnnnnnnnnnnnnnnnnnnnnnnnnnnnnnnnnnnnnnnnnnnnnnnnnnnnnnnnnnnnnnnnnnnnnnnnnnnnnnnnnnnnnnnnnnnnnnnnnnnnnnnnnnnnnnnnnnnnnnnnnnnnnnnnnnnnnnnnnnnnnnnnnnnnnnnnnnnnnnnnnnnnnnnnnnnnnnnnnnnnnnnnnnnnnnnnnnnnnnnnnnnnnnnnnnnnnnnnnnnnnnnnnnnnnnnnnnnnnnnnnnnnnnnnnnnnnnnnnnnnnnnnnnnnnnnnnnnnnnnnnnnnnnnnnnnnnnnnnnnnnnnnnnnnnnnnnnnnnnnnnnnnnnnnnnnnnnnnnnnnnnnnnnnnnnnnnnnnnnnnnnnnnnnnnnnnnnnnnnnnnnnnnnnnnnnnnnnnnnnnnnnnnnnnnnnnnnnnnnnnnnnnnnnnnnnnnnnnnnnnnnnnnnnnnnnnnnnnnnnnnnnnnnnnnnnnnnnnnnnnnnnnnnnnnnnnnnnnnnnnnnnnnnnnnnnnnnnnnnnnnnnnnnnnnnnnnnnnnnnnnnnnnnnnnnnnnnnnnnnnnnnnnnnnnnnnnnnnnnnnnnnnnnnnnnnnnnnnnnnnnnnnnnnnnnnnnnnnnnnnnnnnnnnnnnnnnnnnnnnnnnnnnnnnnnnnnnnnnnnnnnnnnnnnnnnnnnnnnnnnnnnnnnnnnnnnnnnnnnnnnnnnnnnnnnnnnnnnnnnnnnnnnnnnnnnnnnnnnnnnnnnnnnnnnnnnnnnnnnnnnnnnnnnnnnnnnnnnnnnnnnnnnnnnnnnnnnnnnnnnnnnnnnnnnnnnnnnnnnnnnnnnnnnnnnnnnnnnnnnnnnnnnnnnnnnnnnnnnnnnnnnnnnnnnnnnnnnnnnnnnnnnnnnnnnnnnnnnnnnnnnnnnnnnnnnnnnnnnnnnnnnnnnnnnnnnnnnnnnnnnnnnnnnnnnnnnnnnnnnnnnnnnnnnnnnnnnnnnnnnnnnnnnnnnnnnnnnnnnnnnnnnnnnnnnnnnnnnnnnnnnnnnnnnnnnnnnnnnnnnnnnnnnnnnnnnnnnnnnnnnnnnnnnnnnnnnnnnnnnnnnnnnnnnnnnnnnnnnnnnnnnnnnnnnnnnnnnnnnnnnnnnnnnnnnnnnnnnnnnnnnnnnnnnnnnnnnnnnnnnnnnnnnnnnnnnnnnnnnnnnnnnnnnnnnnnnnnnnnnnnnnnnnnnnnnnnnnnnnnnnnnnnnnnnnnnnnnnnnnnnnnnnnnnnnnnnnnnnnnnnnnnnnnnnnnnnnnnnnnnnnnnnnnnnnnnnnnnnnnnnnnnnnnnnnnnnnnnnnnnnnnnnnnnnnnnnnnnnnnnnnnnnnnnnnnnnnnnnnnnnnnnnnnnnnnnnnnnnnnnnnnnnnnnnnnnnnnnnnnnnnnnnnnnnnnnnnnnnnnnnnnnnnnnnnnnnnnnnnnnnnnnnnnnnnnnnnnnnnnnnnnnnnnnnnnnnnnnnnnnnnnnnnnnnnnnnnnnnnnnnnnnnnnnnnnnnnnnnnnnnnnnnnnnnnnnnnnnnnnnnnnnnnnnnnnnnnnnnnnnnnnnnnnnnnnnnnnnnnnnnnnnnnnnnnnnnnnnnnnnnnnnnnnnnnnnnnnnnnnnnnnnnnnnnnnnnnnnnnnnnnnnnnnnnnnnnnnnnnnnnnnnnnnnnnnnnnnnnnnnnnnnnnnnnnnnnnnnnnnnnnnnnnnnnnnnnnnnnnnnnnnnnnnnnnnnnnnnnnnnnnnnnnnnnnnnnnnnnnnnnnnnnnnnnnnnnnnnnnnnnnnnnnnnnnnnnnnnnnnnnnnnnnnnnnnnnnnnnnnnnnnnnnnnnnnnnnnnnnnnnnnnnnnnnnnnnnnnnnnnnnnnnnnnnnnnnnnnnnnnnnnnnnnnnnnnnnnnnnnnnnnnnnnnnnnnnnnnnnnnnnnnnnnnnnnnnnnnnnnnnnnnnnnnnnnnnnnnnnnnnnnnnnnnnnnnnnnnnnnnnnnnnnnnnnnnnnnnnnnnnnnnnnnnnnnnnnnnnnnnnnnnnnnnnnnnnnnnnnnnnnnnnnnnnnnnnnnnnnnnnnnnnnnnnnnnnnnnnnnnnnnnnnnnnnnnnnnnnnnnnnnnnnnnnnnnnnnnnnnnnnnnnnnnnnnnnnnnnnnnnnnnnnnnnnnnnnnnnnnnnnnnnnnnnnnnnnnnnnnnnnnnnnnnnnnnnnnnnnnnnnnnnnnnnnnnnnnnnnnnnnnnnnnnnnnnnnnnnnnnnnnnnnnnnnnnnnnnnnnnnnnnnnnnnnnnnnnnnnnnnnnnnnnnnnnnnnnnnnnnnnnnnnnnnnnnnnnnnnnnnnnnnnnnnnnnnnnnnnnnnnnnnnnnnnnnnnnnnnnnnnnnnnnnnnnnnnnnnnnnnnnnnnnnnnnnnnnnnnnnnnnnnnnnnnnnnnnnnnnnnnnnnnnnnnnnnnnnnnnnnnnnnnnnnnnnnnnnnnnnnnnnnnnnnnnnnnnnnnnnnnnnnnnnnnnnnnnnnnnnnnnnnnnnnnnnnnnnnnnnnnnnnnnnnnnnnnnnnnnnnnnnnnnnnnnnnnnnnnnnnnnnnnnnnnnnnnnnnnnnnnnnnnnnnnnnnnnnnnnnnnnnnnnnnnnnnnnnnnnnnnnnnnnnnnnnnnnnnnnnnnnnnnnnnnnnnnnnnnnnnnnnnnnnnnnnnnnnnnnnnnnnnnnnnnnnnnnnnnnnnnnnnnnnnnnnnnnnnnnnnnnnnnnnnnnnnnnnnnnnnnnnnnnnnnnnnnnnnnnnnnnnnnnnnnnnnnnnnnnnnnnnnnnnnnnnnnnnnnnnnnnnnnnnnnnnnnnnnnnnnnnnnnnnnnnnnnnnnnnnnnnnnnnnnnnnnnnnnnnnnnnnnnnnnnnnnnnnnnnnnnnnnnnnnnnnnnnnnnnnnnnnnnnnnnnnnnnnnnnnnnnnnnnnnnnnnnnnnnnnnnnnnnnnnnnnnnnnnnnnnnnnnnnnnnnnnnnnnnnnnnnnnnnnnnnnnnnnnnnnnnnnnnnnnnnnnnnnnnnnnnnnnnnnnnnnnnnnnnnnnnnnnnnnnnnnnnnnnnnnnnnnnnnnnnnnnnnnnnnnnnnnnnnnnnnnnnnnnnnnnnnnnnnnnnnnnnnnnnnnnnnnnnnnnnnnnnnnnnnnnnnnnnnnnnnnnnnnnnnnnnnnnnnnnnnnnnnnnnnnnnnnnnnnnnnnnnnnnnnnnnnnnnnnnnnnnnnnnnnnnnnnnnnnnnnnnnnnnnnnnnnnnnnnnnnnnnnnnnnnnnnnnnnnnnnnnnnnnnnnnnnnnnnnnnnnnnnnnnnnnnnnnnnnnnnnnnnnnnnnnnnnnnnnnnnnnnnnnnnnnnnnnnnnnnnnnnnnnnnnnnnnnnnnnnnnnnnnnnnnnnnnnnnnnnnnnnnnnnnnnnnnnnnnnnnnnnnnnnnnnnnnnnnnnnnnnnnnnnnnnnnnnnnnnnnnnnnnnnnnnnnnnnnnnnnnnnnnnnnnnnnnnnnnnnnnnnnnnnnnnnnnnnnnnnnnnnnnnnnnnnnnnnnnnnnnnnnnnnnnnnnnnnnnnnnnnnnnnnnnnnnnnnnnnnnnnnnnnnnnnnnnnnnnnnnnnnnnnnnnnnnnnnnnnnnnnnnnnnnnnnnnnnnnnnnnnnnnnnnnnnnnnnnnnnnnnnnnnnnnnnnnnnnnnnnnnnnnnnnnnnnnnnnnnnnnnnnnnnnnnnnnnnnnnnnnnnnnnnnnnnnnnnnnnnnnnnnnnnnnnnnnnnnnnnnnnnnnnnnnnnnnnnnnnnnnnnnnnnnnnnnnnnnnnnnnnnnnnnnnnnnnnnnnnnnnnnnnnnnnnnnnnnnnnnnnnnnnnnnnnnnnnnnnnnnnnnnnnnnnnnnnnnnnnnnnnnnnnnnnnnnnnnnnnnnnnnnnnnnnnnnnnnnnnnnnnnnnnnnnnnnnnnnnnnnnnnnnnnnnnnnnnnnnnnnnnnnnnnnnnnnnnnnnnnnnnnnnnnnnnnnnnnnnnnnnnnnnnnnnnnnnnnnnnnnnnnnnnnnnnnnnnnnnnnnnnnnnnnnnnnnnnnnnnnnnnnnnnnnnnnnnnnnnnnnnnnnnnnnnnnnnnnnnnnnnnnnnnnnnnnnnnnnnnnnnnnnnnnnnnnnnnnnnnnnnnnnnnnnnnnnnnnnnnnnnnnnnnnnnnnnnnnnnnnnnnnnnnnnnnnnnnnnnnnnnnnnnnnnnnnnnnnnnnnnnnnnnnnnnnnnnnnnnnnnnnnnnnnnnnnnnnnnnnnnnnnnnnnnnnnnnnnnnnnnnnnnnnnnnnnnnnnnnnnnnnnnnnnnnnnnnnnnnnnnnnnnnnnnnnnnnnnnnnnnnnnnnnnnnnnnnnnnnnnnnnnnnnnnnnnnnnnnnnnnnnnnnnnnnnnnnnnnnnnnnnnnnnnnnnnnnnnnnnnnnnnnnnnnnnnnnnnnnnnnnnnnnnnnnnnnnnnnnnnnnnnnnnnnnnnnnnnnnnnnnnnnnnnnnnnnnnnnnnnnnnnnnnnnnnnnnnnnnnnnnnnnnnnnnnnnnnnnnnnnnnnnnnnnnnnnnnnnnnnnnnnnnnnnnnnnnnnnnnnnnnnnnnnnnnnnnnnnnnnnnnnnnnnnnnnnnnnnnnnnnnnnnnnnnnnnnnnnnnnnnnnnnnnnnnnnnnnnnnnnnnnnnnnnnnnnnnnnnnnnnnnnnnnnnnnnnnnnnnnnnnnnnnnnnnnnnnnnnnnnnnnnnnnnnnnnnnnnnnnnnnnnnnnnnnnnnnnnnnnnnnnnnnnnnnnnnnnnnnnnnnnnnnnnnnnnnnnnnnnnnnnnnnnnnnnnnnnnnnnnnnnnnnnnnnnnnnnnnnnnnnnnnnnnnnnnnnnnnnnnnnnnnnnnnnnnnnnnnnnnnnnnnnnnnnnnnnnnnnnnnnnnnnnnnnnnnnnnnnnnnnnnnnnnnnnnnnnnnnnnnnnnnnnnnnnnnnnnnnnnnnnnnnnnnnnnnnnnnnnnnnnnnnnnnnnnnnnnnnnnnnnnnnnnnnnnnnnnnnnnnnnnnnnnnnnnnnnnnnnnnnnnnnnnnnnnnnnnnnnnnnnnnnnnnnnnnnnnnnnnnnnnnnnnnnnnnnnnnnnnnnnnnnnnnnnnnnnnnnnnnnnnnnnnnnnnnnnnnnnnnnnnnnnnnnnnnnnnnnnnnnnnnnnnnnnnnnnnnnnnnnnnnnnnnnnnnnnnnnnnnnnnnnnnnnnnnnnnnnnnnnnnnnnnnnnnnnnnnnnnnnnnnnnnnnnnnnnnnnnnnnnnnnnnnnnnnnnnnnnnnnnnnnnnnnnnnnnnnnnnnnnnnnnnnnnnnnnnnnnnnnnnnnnnnnnnnnnnnnnnnnnnnnnnnnnnnnnnnnnnnnnnnnnnnnnnnnnnnnnnnnnnnnnnnnnnnnnnnnnnnnnnnnnnnnnnnnnnnnnnnnnnnnnnnnnnnnnnnnnnnnnnnnnnnnnnnnnnnnnnnnnnnnnnnnnnnnnnnnnnnnnnnnnnnnnnnnnnnnnnnnnnnnnnnnnnnnnnnnnnnnnnnnnnnnnnnnnnnnnnnnnnnnnnnnnnnnnnnnnnnnnnnnnnnnnnnnnnnnnnnnnnnnnnnnnnnnnnnnnnnnnnnnnnnnnnnnnnnnnnnnnnnnnnnnnnnnnnnnnnnnnnnnnnnnnnnnnnnnnnnnnnnnnnnnnnnnnnnnnnnnnnnnnnnnnnnnnnnnnnnnnnnnnnnnnnnnnnnnnnnnnnnnnnnnnnnnnnnnnnnnnnnnnnnnnnnnnnnnnnnnnnnnnnnnnnnnnnnnnnnnnnnnnnnnnnnnnnnnnnnnnnnnnnnnnnnnnnnnnnnnnnnnnnnnnnnnnnnnnnnnnnnnnnnnnnnnnnnnnnnnnnnnnnnnnnnnnnnnnnnnnnnnnnnnnnnnnnnnnnnnnnnnnnnnnnnnnnnnnnnnnnnnnnnnnnnnnnnnnnnnnnnnnnnnnnnnnnnnnnnnnnnnnnnnnnnnnnnnnnnnnnnnnnnnnnnnnnnnnnnnnnnnnnnnnnnnnnnnnnnnnnnnnnnnnnnnnnnnnnnnnnnnnnnnnnnnnnnnnnnnnnnnnnnnnnnnnnnnnnnnnnnnnnnnnnnnnnnnnnnnnnnnnnnnnnnnnnnnnnnnnnnnnnnnnnnnnnnnnnnnnnnnnnnnnnnnnnnnnnnnnnnnnnnnnnnnnnnnnnnnnnnnnnnnnnnnnnnnnnnnnnnnnnnnnnnnnnnnnnnnnnnnnnnnnnnnnnnnnnnnnnnnnnnnnnnnnnnnnnnnnnnnnnnnnnnnnnnnnnnnnnnnnnnnnnnnnnnnnnnnnnnnnnnnnnnnnnnnnnnnnnnnnnnnnnnnnnnnnnnnnnnnnnnnnnnnnnnnnnnnnnnnnnnnnnnnnnnnnnnnnnnnnnnnnnnnnnnnnnnnnnnnnnnnnnnnnnnnnnnnnnnnnnnnnnnnnnnnnnnnnnnnnnnnnnnnnnnnnnnnnnnnnnnnnnnnnnnnnnnnnnnnnnnnnnnnnnnnnnnnnnnnnnnnnnnnnnnnnnnnnnnnnnnnnnnnnnnnnnnnnnnnnnnnnnnnnnnnnnnnnnnnnnnnnnnnnnnnnnnnnnnnnnnnnnnnnnnnnnnnnnnnnnnnnnnnnnnnnnnnnnnnnnnnnnnnnnnnnnnnnnnnnnnnnnnnnnnnnnnnnnnnnnnnnnnnnnnnnnnnnnnnnnnnnnnnnnnnnnnnnnnnnnnnnnnnnnnnnnnnnnnnnnnnnnnnnnnnnnnnnnnnnnnnnnnnnnnnnnnnnnnnnnnnnnnnnnnnnnnnnnnnnnnnnnnnnnnnnnnnnnnnnnnnnnnnnnnnnnnnnnnnnnnnnnnnnnnnnnnnnnnnnnnnnnnnnnnnnnnnnnnnnnnnnnnnnnnnnnnnnnnnnnnnnnnnnnnnnnnnnnnnnnnnnnnnnnnnnnnnnnnnnnnnnnnnnnnnnnnnnnnnnnnnnnnnnnnnnnnnnnnnnnnnnnnnnnnnnnnnnnnnnnnnnnnnnnnnnnnnnnnnnnnnnnnnnnnnnnnnnnnnnnnnnnnnnnnnnnnnnnnnnnnnnnnnnnnnnnnnnnnnnnnnnnnnnnnnnnnnnnnnnnnnnnnnnnnnnnnnnnnnnnnnnnnnnnnnnnnnnnnnnnnnnnnnnnnnnnnnnnnnnnnnnnnnnnnnnnnnnnnnnnnnnnnnnnnnnnnnnnnnnnnnnnnnnnnnnnnnnnnnnnnnnnnnnnnnnnnnnnnnnnnnnnnnnnnnnnnnnnnnnnnnnnnnnnnnnnnnnnnnnnnnnnnnnnnnnnnnnnnnnnnnnnnnnnnnnnnnnnnnnnnnnnnnnnnnnnnnnnnnnnnnnnnnnnnnnnnnnnnnnnnnnnnnnnnnnnnnnnnnnnnnnnnnnnnnnnnnnnnnnnnnnnnnnnnnnnnnnnnnnnnnnnnnnnnnnnnnnnnnnnnnnnnnnnnnnnnnnnnnnnnnnnnnnnnnnnnnnnnnnnnnnnnnnnnnnnnnnnnnnnnnnnnnnnnnnnnnnnnnnnnnnnnnnnnnnnnnnnnnnnnnnnnnnnnnnnnnnnnnnnnnnnnnnnnnnnnnnnnnnnnnnnnnnnnnnnnnnnnnnnnnnnnnnnnnnnnnnnnnnnnnnnnnnnnnnnnnnnnnnnnnnnnnnnnnnnnnnnnnnnnnnnnnnnnnnnnnnnnnnnnnnnnnnnnnnnnnnnnnnnnnnnnnnnnnnnnnnnnnnnnnnnnnnnnnnnnnnnnnnnnnnnnnnnnnnnnnnnnnnnnnnnnnnnnnnnnnnnnnnnnnnnnnnnnnnnnnnnnnnnnnnnnnnnnnnnnnnnnnnnnnnnnnnnnnnnnnnnnnnnnnnnnnnnnnnnnnnnnnnnnnnnnnnnnnnnnnnnnnnnnnnnnnnnnnnnnnnnnnnnnnnnnnnnnnnnnnnnnnnnnnnnnnnnnnnnnnnnnnnnnnnnnnnnnnnnnnnnnnnnnnnnnnnnnnnnnnnnnnnnnnnnnnnnnnnnnnnnnnnnnnnnnnnnnnnnnnnnnnnnnnnnnnnnnnnnnnnnnnnnnnnnnnnnnnnnnnnnnnnnnnnnnnnnnnnnnnnnnnnnnnnnnnnnnnnnnnnnnnnnnnnnnnnnnnnnnnnnnnnnnnnnnnnnnnnnnnnnnnnnnnnnnnnnnnnnnnnnnnnnnnnnnnnnnnnnnnnnnnnnnnnnnnnnnnnnnnnnnnnnnnnnnnnnnnnnnnnnnnnnnnnnnnnnnnnnnnnnnnnnnnnnnnnnnnnnnnnnnnnnnnnnnnnnnnnnnnnnnnnnnnnnnnnnnnnnnnnnnnnnnnnnnnnnnnnnnnnnnnnnnnnnnnnnnnnnnnnnnnnnnnnnnnnnnnnnnnnnnnnnnnnnnnnnnnnnnnnnnnnnnnnnnnnnnnnnnnnnnnnnnnnnnnnnnnnnnnnnnnnnnnnnnnnnnnnnnnnnnnnnnnnnnnnnnnnnnnnnnnnnnnnnnnnnnnnnnnnnnnnnnnnnnnnnnnnnnnnnnnnnnnnnnnnnnnnnnnnnnnnnnnnnnnnnnnnnnnnnnnnnnnnnnnnnnnnnnnnnnnnnnnnnnnnnnnnnnnnnnnnnnnnnnnnnnnnnnnnnnnnnnnnnnnnnnnnnnnnnnnnnnnnnnnnnnnnnnnnnnnnnnnnnnnnnnnnnnnnnnnnnnnnnnnnnnnnnnnnnnnnnnnnnnnnnnnnnnnnnnnnnnnnnnnnnnnnnnnnnnnnnnnnnnnnnnnnnnnnnnnnnnnnnnnnnnnnnnnnnnnnnnnnnnnnnnnnnnnnnnnnnnnnnnnnnnnnnnnnnnnnnnnnnnnnnnnnnnnnnnnnnnnnnnnnnnnnnnnnnnnnnnnnnnnnnnnnnnnnnnnnnnnnnnnnnnnnnnnnnnnnnnnnnnnnnnnnnnnnnnnnnnnnnnnnnnnnnnnnnnnnnnnnnnnnnnnnnnnnnnnnnnnnnnnnnnnnnnnnnnnnnnnnnnnnnnnnnnnnnnnnnnnnnnnnnnnnnnnnnnnnnnnnnnnnnnnnnnnnnnnnnnnnnnnnnnnnnnnnnnnnnnnnnnnnnnnnnnnnnnnnnnnnnnnnnnnnnnnnnnnnnnnnnnnnnnnnnnnnnnnnnnnnnnnnnnnnnnnnnnnnnnnnnnnnnnnnnnnnnnnnnnnnnnnnnnnnnnnnnnnnnnnnnnnnnnnnnnnnnnnnnnnnnnnnnnnnnnnnnnnnnnnnnnnnnnnnnnnnnnnnnnnnnnnnnnnnnnnnnnnnnnnnnnnnnnnnnnnnnnnnnnnnnnnnnnnnnnnnnnnnnnnnnnnnnnnnnnnnnnnnnnnnnnnnnnnnnnnnnnnnnnnnnnnnnnnnnnnnnnnnnnnnnnnnnnnnnnnnnnnnnnnnnnnnnnnnnnnnnnnnnnnnnnnnnnnnnnnnnnnnnnnnnnnnnnnnnnnnnnnnnnnnnnnnnnnnnnnnnnnnnnnnnnnnnnnnnnnnnnnnnnnnnnnnnnnnnnnnnnnnnnnnnnnnnnnnnnnnnnnnnnnnnnnnnnnnnnnnnnnnnnnnnnnnnnnnnnnnnnnnnnnnnnnnnnnnnnnnnnnnnnnnnnnnnnnnnnnnnnnnnnnnnnnnnnnnnnnnnnnnnnnnnnnnnnnnnnnnnnnnnnnnnnnnnnnnnnnnnnnnnnnnnnnnnnnnnnnnnnnnnnnnnnnnnnnnnnnnnnnnnnnnnnnnnnnnnnnnnnnnnnnnnnnnnnnnnnnnnnnnnnnnnnnnnnnnnnnnnnnnnnnnnnnnnnnnnnnnnnnnnnnnnnnnnnnnnnnnnnnnnnnnnnnnnnnnnnnnnnnnnnnnnnnnnnnnnnnnnnnnnnnnnnnnnnnnnnnnnnnnnnnnnnnnnnnnnnnnnnnnnnnnnnnnnnnnnnnnnnnnnnnnnnnnnnnnnnnnnnnnnnnnnnnnnnnnnnnnnnnnnnnnnnnnnnnnnnnnnnnnnnnnnnnnnnnnnnnnnnnnnnnnnnnnnnnnnnnnnnnnnnnnnnnnnnnnnnnnnnnnnnnnnnnnnnnnnnnnnnnnnnnnnnnnnnnnnnnnnnnnnnnnnnnnnnnnnnnnnnnnnnnnnnnnnnnnnnnnnnnnnnnnnnnnnnnnnnnnnnnnnnnnnnnnnnnnnnnnnnnnnnnnnnnnnnnnnnnnnnnnnnnnnnnnnnnnnnnnnnnnnnnnnnnnnnnnnnnnnnnnnnnnnnnnnnnnnnnnnnnnnnnnnnnnnnnnnnnnnnnnnnnnnnnnnnnnnnnnnnnnnnnnnnnnnnnnnnnnnnnnnnnnnnnnnnnnnnnnnnnnnnnnnnnnnnnnnnnnnnnnnnnnnnnnnnnnnnnnnnnnnnnnnnnnnnnnnnnnnnnnnnnnnnnnnnnnnnnnnnnnnnnnnnnnnnnnnnnnnnnnnnnnnnnnnnnnnnnnnnnnnnnnnnnnnnnnnnnnnnnnnnnnnnnnnnnnnnnnnnnnnnnnnnnnnnnnnnnnnnnnnnnnnnnnnnnnnnnnnnnnnnnnnnnnnnnnnnnnnnnnnnnnnnnnnnnnnnnnnnnnnnnnnnnnnnnnnnnnnnnnnnnnnnnnnnnnnnnnnnnnnnnnnnnnnnnnnnnnnnnnnnnnnnnnnnnnnnnnnnnnnnnnnnnnnnnnnnnnnnnnnnnnnnnnnnnnnnnnnnnnnnnnnnnnnnnnnnnnnnnnnnnnnnnnnnnnnnnnnnnnnnnnnnnnnnnnnnnnnnnnnnnnnnnnnnnnnnnnnnnnnnnnnnnnnnnnnnnnnnnnnnnnnnnnnnnnnnnnnnnnnnnnnnnnnnnnnnnnnnnnnnnnnnnnnnnnnnnnnnnnnnnnnnnnnnnnnnnnnnnnnnnnnnnnnnnnnnnnnnnnnnnnnnnnnnnnnnnnnnnnnnnnnnnnnnnnnnnnnnnnnnnnnnnnnnnnnnnnnnnnnnnnnnnnnnnnnnnnnnnnnnnnnnnnnnnnnnnnnnnnnnnnnnnnnnnnnnnnnnnnnnnnnnnnnnnnnnnnnnnnnnnnnnnnnnnnnnnnnnnnnnnnnnnnnnnnnnnnnnnnnnnnnnnnnnnnnnnnnnnnnnnnnnnnnnnnnnnnnnnnnnnnnnnnnnnnnnnnnnnnnnnnnnnnnnnnnnnnnnnnnnnnnnnnnnnnnnnnnnnnnnnnnnnnnnnnnnnnnnnnnnnnnnnnnnnnnnnnnnnnnnnnnnnnnnnnnnnnnnnnnnnnnnnnnnnnnnnnnnnnnnnnnnnnnnnnnnnnnnnnnnnnnnnnnnnnnnnnnnnnnnnnnnnnnnnnnnnnnnnnnnnnnnnnnnnnnnnnnnnnnnnnnnnnnnnnnnnnnnnnnnnnnnnnnnnnnnnnnnnnnnnnnnnnnnnnnnnnnnnnnnnnnnnnnnnnnnnnnnnnnnnnnnnnnnnnnnnnnnnnnnnnnnnnnnnnnnnnnnnnnnnnnnnnnnnnnnnnnnnnnnnnnnnnnnnnnnnnnnnnnnnnnnnnnnnnnnnnnnnnnnnnnnnnnnnnnnnnnnnnnnnnnnnnnnnnnnnnnnnnnnnnnnnnnnnnnnnnnnnnnnnnnnnnnnnnnnnnnnnnnnnnnnnnnnnnnnnnnnnnnnnnnnnnnnnnnnnnnnnnnnnnnnnnnnnnnnnnnnnnnnnnnnnnnnnnnnnnnnnnnnnnnnnnnnnnnnnnnnnnnnnnnnnnnnnnnnnnnnnnnnnnnnnnnnnnnnnnnnnnnnnnnnnnnnnnnnnnnnnnnnnnnnnnnnnnnnnnnnnnnnnnnnnnnnnnnnnnnnnnnnnnnnnnnnnnnnnnnnnnnnnnnnnnnnnnnnnnnnnnnnnnnnnnnnnnnnnnnnnnnnnnnnnnnnnnnnnnnnnnnnnnnnnnnnnnnnnnnnnnnnnnnnnnnnnnnnnnnnnnnnnnnnnnnnnnnnnnnnnnnnnnnnnnnnnnnnnnnnnnnnnnnnnnnnnnnnnnnnnnnnnnnnnnnnnnnnnnnnnnnnnnnnnnnnnnnnnnnnnnnnnnnnnnnnnnnnnnnnnnnnnnnnnnnnnnnnnnnnnnnnnnnnnnnnnnnnnnnnnnnnnnnnnnnnnnnnnnnnnnnnnnnnnnnnnnnnnnnnnnnnnnnnnnnnnnnnnnnnnnnnnnnnnnnnnnnnnnnnnnnnnnnnnnnnnnnnnnnnnnnnnnnnnnnnnnnnnnnnnnnnnnnnnnnnnnnnnnnnnnnnnnnnnnnnnnnnnnnnnnnnnnnnnnnnnnnnnnnnnnnnnnnnnnnnnnnnnnnnnnnnnnnnnnnnnnnnnnnnnnnnnnnnnnnnnnnnnnnnnnnnnnnnnnnnnnnnnnnnnnnnnnnnnnnnnnnnnnnnnnnnnnnnnnnnnnnnnnnnnnnnnnnnnnnnnnnnnnnnnnnnnnnnnnnnnnnnnnnnnnnnnnnnnnnnnnnnnnnnnnnnnnnnnnnnnnnnnnnnnnnnnnnnnnnnnnnnnnnnnnnnnnnnnnnnnnnnnnnnnnnnnnnnnnnnnnnnnnnnnnnnnnnnnnnnnnnnnnnnnnnnnnnnnnnnnnnnnnnnnnnnnnnnnnnnnnnnnnnnnnnnnnnnnnnnnnnnnnnnnnnnnnnnnnnnnnnnnnnnnnnnnnnnnnnnnnnnnnnnnnnnnnnnnnnnnnnnnnnnnnnnnnnnnnnnnnnnnnnnnnnnnnnnnnnnnnnnnnnnnnnnnnnnnnnnnnnnnnnnnnnnnnnnnnnnnnnnnnnnnnnnnnnnnnnnnnnnnnnnnnnnnnnnnnnnnnnnnnnnnnnnnnnnnnnnnnnnnnnnnnnnnnnnnnnnnnnnnnnnnnnnnnnnnnnnnnnnnnnnnnnnnnnnnnnnnnnnnnnnnnnnnnnnnnnnnnnnnnnnnnnnnnnnnnnnnnnnnnnnnnnnnnnnnnnnnnnnnnnnnnnnnnnnnnnnnnnnnnnnnnnnnnnnnnnnnnnnnnnnnnnnnnnnnnnnnnnnnnnnnnnnnnnnnnnnnnnnnnnnnnnnnnnnnnnnnnnnnnnnnnnnnnnnnnnnnnnnnnnnnnnnnnnnnnnnnnnnnnnnnnnnnnnnnnnnnnnnnnnnnnnnnnnnnnnnnnnnnnnnnnnnnnnnnnnnnnnnnnnnnnnnnnnnnnnnnnnnnnnnnnnnnnnnnnnnnnnnnnnnnnnnnnnnnnnnnnnnnnnnnnnnnnnnnnnnnnnnnnnnnnnnnnnnnnnnnnnnnnnnnnnnnnnnnnnnnnnnnnnnnnnnnnnnnnnnnnnnnnnnnnnnnnnnnnnnnnnnnnnnnnnnnnnnnnnnnnnnnnnnnnnnnnnnnnnnnnnnnnnnnnnnnnnnnnnnnnnnnnnnnnnnnnnnnnnnnnnnnnnnnnnnnnnnnnnnnnnnnnnnnnnnnnnnnnnnnnnnnnnnnnnnnnnnnnnnnnnnnnnnnnnnnnnnnnnnnnnnnnnnnnnnnnnnnnnnnnnnnnnnnnnnnnnnnnnnnnnnnnnnnnnnnnnnnnnnnnnnnnnnnnnnnnnnnnnnnnnnnnnnnnnnnnnnnnnnnnnnnnnnnnnnnnnnnnnnnnnnnnnnnnnnnnnnnnnnnnnnnnnnnnnnnnnnnnnnnnnnnnnnnnnnnnnnnnnnnnnnnnnnnnnnnnnnnnnnnnnnnnnnnnnnnnnnnnnnnnnnnnnnnnnnnnnnnnnnnnnnnnnnnnnnnnnnnnnnnnnnnnnnnnnnnnnnnnnnnnnnnnnnnnnnnnnnnnnnnnnnnnnnnnnnnnnnnnnnnnnnnnnnnnnnnnnnnnnnnnnnnnnnnnnnnnnnnnnnnnnnnnnnnnnnnnnnnnnnnnnnnnnnnnnnnnnnnnnnnnnnnnnnnnnnnnnnnnnnnnnnnnnnnnnnnnnnnnnnnnnnnnnnnnnnnnnnnnnnnnnnnnnnnnnnnnnnnnnnnnnnnnnnnnnnnnnnnnnnnnnnnnnnnnnnnnnnnnnnnnnnnnnnnnnnnnnnnnnnnnnnnnnnnnnnnnnnnnnnnnnnnnnnnnnnnnnnnnnnnnnnnnnnnnnnnnnnnnnnnnnnnnnnnnnnnnnnnnnnnnnnnnnnnnnnnnnnnnnnnnnnnnnnnnnnnnnnnnnnnnnnnnnnnnnnnnnnnnnnnnnnnnnnnnnnnnnnnnnnnnnnnnnnnnnnnnnnnnnnnnnnnnnnnnnnnnnnnnnnnnnnnnnnnnnnnnnnnnnnnnnnnnnnnnnnnnnnnnnnnnnnnnnnnnnnnnnnnnnnnnnnnnnnnnnnnnnnnnnnnnnnnnnnnnnnnnnnnnnnnnnnnnnnnnnnnnnnnnnnnnnnnnnnnnnnnnnnnnnnnnnnnnnnnnnnnnnnnnnnnnnnnnnnnnnnnnnnnnnnnnnnnnnnnnnnnnnnnnnnnnnnnnnnnnnnnnnnnnnnnnnnnnnnnnnnnnnnnnnnnnnnnnnnnnnnnnnnnnnnnnnnnnnnnnnnnnnnnnnnnnnnnnnnnnnnnnnnnnnnnnnnnnnnnnnnnnnnnnnnnnnnnnnnnnnnnnnnnnnnnnnnnnnnnnnnnnnnnnnnnnnnnnnnnnnnnnnnnnnnnnnnnnnnnnnnnnnnnnnnnnnnnnnnnnnnnnnnnnnnnnnnnnnnnnnnnnnnnnnnnnnnnnnnnnnnnnnnnnnnnnnnnnnnnnnnnnnnnnnnnnnnnnnnnnnnnnnnnnnnnnnnnnnnnnnnnnnnnnnnnnnnnnnnnnnnnnnnnnnnnnnnnnnnnnnnnnnnnnnnnnnnnnnnnnnnnnnnnnnnnnnnnnnnnnnnnnnnnnnnnnnnnnnnnnnnnnnnnnnnnnnnnnnnnnnnnnnnnnnnnnnnnnnnnnnnnnnnnnnnnnnnnnnnnnnnnnnnnnnnnnnnnnnnnnnnnnnnnnnnnnnnnnnnnnnnnnnnnnnnnnnnnnnnnnnnnnnnnnnnnnnnnnnnnnnnnnnnnnnnnnnnnnnnnnnnnnnnnnnnnnnnnnnnnnnnnnnnnnnnnnnnnnnnnnnnnnnnnnnnnnnnnnnnnnnnnnnnnnnnnnnnnnnnnnnnnnnnnnnnnnnnnnnnnnnnnnnnnnnnnnnnnnnnnnnnnnnnnnnnnnnnnnnnnnnnnnnnnnnnnnnnnnnnnnnnnnnnnnnnnnnnnnnnnnnnnnnnnnnnnnnnnnnnnnnnnnnnnnnnnnnnnnnnnnnnnnnnnnnnnnnnnnnnnnnnnnnnnnnnnnnnnnnnnnnnnnnnnnnnnnnnnnnnnnnnnnnnnnnnnnnnnnnnnnnnnnnnnnnnnnnnnnnnnnnnnnnnnnnnnnnnnnnnnnnnnnnnnnnnnnnnnnnnnnnnnnnnnnnnnnnnnnnnnnnnnnnnnnnnnnnnnnnnnnnnnnnnnnnnnnnnnnnnnnnnnnnnnnnnnnnnnnnnnnnnnnnnnnnnnnnnnnnnnnnnnnnnnnnnnnnnnnnnnnnnnnnnnnnnnnnnnnnnnnnnnnnnnnnnnnnnnnnnnnnnnnnnnnnnnnnnnnnnnnnnnnnnnnnnnnnnnnnnnnnnnnnnnnnnnnnnnnnnnnnnnnnnnnnnnnnnnnnnnnnnnnnnnnnnnnnnnnnnnnnnnnnnnnnnnnnnnnnnnnnnnnnnnnnnnnnnnnnnnnnnnnnnnnnnnnnnnnnnnnnnnnnnnnnnnnnnnnnnnnnnnnnnnnnnnnnnnnnnnnnnnnnnnnnnnnnnnnnnnnnnnnnnnnnnnnnnnnnnnnnnnnnnnnnnnnnnnnnnnnnnnnnnnnnnnnnnnnnnnnnnnnnnnnnnnnnnnnnnnnnnnnnnnnnnnnnnnnnnnnnnnnnnnnnnnnnnnnnnnnnnnnnnnnnnnnnnnnnnnnnnnnnnnnnnnnnnnnnnnnnnnnnnnnnnnnnnnnnnnnnnnnnnnnnnnnnnnnnnnnnnnnnnnnnnnnnnnnnnnnnnnnnnnnnnnnnnnnnnnnnnnnnnnnnnnnnnnnnnnnnnnnnnnnnnnnnnnnnnnnnnnnnnnnnnnnnnnnnnnnnnnnnnnnnnnnnnnnnnnnnnnnnnnnnnnnnnnnnnnnnnnnnnnnnnnnnnnnnnnnnnnnnnnnnnnnnnnnnnnnnnnnnnnnnnnnnnnnnnnnnnnnnnnnnnnnnnnnnnnnnnnnnnnnnnnnnnnnnnnnnnnnnnnnnnnnnnnnnnnnnnnnnnnnnnnnnnnnnnnnnnnnnnnnnnnnnnnnnnnnnnnnnnnnnnnnnnnnnnnnnnnnnnnnnnnnnnnnnnnnnnnnnnnnnnnnnnnnnnnnnnnnnnnnnnnnnnnnnnnnnnnnnnnnnnnnnnnnnnnnnnnnnnnnnnnnnnnnnnnnnnnnnnnnnnnnnnnnnnnnnnnnnnnnnnnnnnnnnnnnnnnnnnnnnnnnnnnnnnnnnnnnnnnnnnnnnnnnnnnnnnnnnnnnnnnnnnnnnnnnnnnnnnnnnnnnnnnnnnnnnnnnnnnnnnnnnnnnnnnnnnnnnnnnnnnnnnnnnnnnnnnnnnnnnnnnnnnnnnnnnnnnnnnnnnnnnnnnnnnnnnnnnnnnnnnnnnnnnnnnnnnnnnnnnnnnnnnnnnnnnnnnnnnnnnnnnnnnnnnnnnnnnnnnnnnnnnnnnnnnnnnnnnnnnnnnnnnnnnnnnnnnnnnnnnnnnnnnnnnnnnnnnnnnnnnnnnnnnnnnnnnnnnnnnnnnnnnnnnnnnnnnnnnnnnnnnnnnnnnnnnnnnnnnnnnnnnnnnnnnnnnnnnnnnnnnnnnnnnnnnnnnnnnnnnnnnnnnnnnnnnnnnnnnnnnnnnnnnnnnnnnnnnnnnnnnnnnnnnnnnnnnnnnnnnnnnnnnnnnnnnnnnnnnnnnnnnnnnnnnnnnnnnnnnnnnnnnnnnnnnnnnnnnnnnnnnnnnnnnnnnnnnnnnnnnnnnnnnnnnnnnnnnnnnnnnnnnnnnnnnnnnnnnnnnnnnnnnnnnnnnnnnnnnnnnnnnnnnnnnnnnnnnnnnnnnnnnnnnnnnnnnnnnnnnnnnnnnnnnnnnnnnnnnnnnnnnnnnnnnnnnnnnnnnnnnnnnnnnnnnnnnnnnnnnnnnnnnnnnnnnnnnnnnnnnnnnnnnnnnnnnnnnnnnnnnnnnnnnnnnnnnnnnnnnnnnnnnnnnnnnnnnnnnnnnnnnnnnnnnnnnnnnnnnnnnnnnnnnnnnnnnnnnnnnnnnnnnnnnnnnnnnnnnnnnnnnnnnnnnnnnnnnnnnnnnnnnnnnnnnnnnnnnnnnnnnnnnnnnnnnnnnnnnnnnnnnnnnnnnnnnnnnnnnnnnnnnnnnnnnnnnnnnnnnnnnnnnnnnnnnnnnnnnnnnnnnnnnnnnnnnnnnnnnnnnnnnnnnnnnnnnnnnnnnnnnnnnnnnnnnnnnnnnnnnnnnnnnnnnnnnnnnnnnnnnnnnnnnnnnnnnnnnnnnnnnnnnnnnnnnnnnnnnnnnnnnnnnnnnnnnnnnnnnnnnnnnnnnnnnnnnnnnnnnnnnnnnnnnnnnnnnnnnnnnnnnnnnnnnnnnnnnnnnnnnnnnnnnnnnnnnnnnnnnnnnnnnnnnnnnnnnnnnnnnnnnnnnnnnnnnnnnnnnnnnnnnnnnnnnnnnnnnnnnnnnnnnnnnnnnnnnnnnnnnnnnnnnnnnnnnnnnnnnnnnnnnnnnnnnnnnnnnnnnnnnnnnnnnnnnnnnnnnnnnnnnnnnnnnnnnnnnnnnnnnnnnnnnnnnnnnnnnnnnnnnnnnnnnnnnnnnnnnnnnnnnnnnnnnnnnnnnnnnnnnnnnnnnnnnnnnnnnnnnnnnnnnnnnnnnnnnnnnnnnnnnnnnnnnnnnnnnnnnnnnnnnnnnnnnnnnnnnnnnnnnnnnnnnnnnnnnnnnnnnnnnnnnnnnnnnnnnnnnnnnnnnnnnnnnnnnnnnnnnnnnnnnnnnnnnnnnnnnnnnnnnnnnnnnnnnnnnnnnnnnnnnnnnnnnnnnnnnnnnnnnnnnnnnnnnnnnnnnnnnnnnnnnnnnnnnnnnnnnnnnnnnnnnnnnnnnnnnnnnnnnnnnnnnnnnnnnnnnnnnnnnnnnnnnnnnnnnnnnnnnnnnnnnnnnnnnnnnnnnnnnnnnnnnnnnnnnnnnnnnnnnnnnnnnnnnnnnnnnnnnnnnnnnnnnnnnnnnnnnnnnnnnnnnnnnnnnnnnnnnnnnnnnnnnnnnnnnnnnnnnnnnnnnnnnnnnnnnnnnnnnnnnnnnnnnnnnnnnnnnnnnnnnnnnnnnnnnnnnnnnnnnnnnnnnnnnnnnnnnnnnnnnnnnnnnnnnnnnnnnnnnnnnnnnnnnnnnnnnnnnnnnnnnnnnnnnnnnnnnnnnnnnnnnnnnnnnnnnnnnnnnnnnnnnnnnnnnnnnnnnnnnnnnnnnnnnnnnnnnnnnnnnnnnnnnnnnnnnnnnnnnnnnnnnnnnnnnnnnnnnnnnnnnnnnnnnnnnnnnnnnnnnnnnnnnnnnnnnnnnnnnnnnnnnnnnnnnnnnnnnnnnnnnnnnnnnnnnnnnnnnnnnnnnnnnnnnnnnnnnnnnnnnnnnnnnnnnnnnnnnnnnnnnnnnnnnnnnnnnnnnnnnnnnnnnnnnnnnnnnnnnnnnnnnnnnnnnnnnnnnnnnnnnnnnnnnnnnnnnnnnnnnnnnnnnnnnnnnnnnnnnnnnnnnnnnnnnnnnnnnnnnnnnnnnnnnnnnnnnnnnnnnnnnnnnnnnnnnnnnnnnnnnnnnnnnnnnnnnnnnnnnnnnnnnnnnnnnnnnnnnnnnnnnnnnnnnnnnnnnnnnnnnnnnnnnnnnnnnnnnnnnnnnnnnnnnnnnnnnnnnnnnnnnnnnnnnnnnnnnnnnnnnnnnnnnnnnnnnnnnnnnnnnnnnnnnnnnnnnnnnnnnnnnnnnnnnnnnnnnnnnnnnnnnnnnnnnnnnnnnnnnnnnnnnnnnnnnnnnnnnnnnnnnnnnnnnnnnnnnnnnnnnnnnnnnnnnnnnnnnnnnnnnnnnnnnnnnnnnnnnnnnnnnnnnnnnnnnnnnnnnnnnnnnnnnnnnnnnnnnnnnnnnnnnnnnnnnnnnnnnnnnnnnnnnnnnnnnnnnnnnnnnnnnnnnnnnnnnnnnnnnnnnnnnnnnnnnnnnnnnnnnnnnnnnnnnnnnnnnnnnnnnnnnnnnnnnnnnnnnnnnnnnnnnnnnnnnnnnnnnnnnnnnnnnnnnnnnnnnnnnnnnnnnnnnnnnnnnnnnnnnnnnnnnnnnnnnnnnnnnnnnnnnnnnnnnnnnnnnnnnnnnnnnnnnnnnnnnnnnnnnnnnnnnnnnnnnnnnnnnnnnnnnnnnnnnnnnnnnnnnnnnnnnnnnnnnnnnnnnnnnnnnnnnnnnnnnnnnnnnnnnnnnnnnnnnnnnnnnnnnnnnnnnnnnnnnnnnnnnnnnnnnnnnnnnnnnnnnnnnnnnnnnnnnnnnnnnnnnnnnnnnnnnnnnnnnnnnnnnnnnnnnnnnnnnnnnnnnnnnnnnnnnnnnnnnnnnnnnnnnnnnnnnnnnnnnnnnnnnnnnnnnnnnnnnnnnnnnnnnnnnnnnnnnnnnnnnnnnnnnnnnnnnnnnnnnnnnnnnnnnnnnnnnnnnnnnnnnnnnnnnnnnnnnnnnnnnnnnnnnnnnnnnnnnnnnnnnnnnnnnnnnnnnnnnnnnnnnnnnnnnnnnnnnnnnnnnnnnnnnnnnnnnnnnnnnnnnnnnnnnnnnnnnnnnnnnnnnnnnnnnnnnnnnnnnnnnnnnnnnnnnnnnnnnnnnnnnnnnnnnnnnnnnnnnnnnnnnnnnnnnnnnnnnnnnnnnnnnnnnnnnnnnnnnnnnnnnnnnnnnnnnnnnnnnnnnnnnnnnnnnnnnnnnnnnnnnnnnnnnnnnnnnnnnnnnnnnnnnnnnnnnnnnnnnnnnnnnnnnnnnnnnnnnnnnnnnnnnnnnnnnnnnnnnnnnnnnnnnnnnnnnnnnnnnnnnnnnnnnnnnnnnnnnnnnnnnnnnnnnnnnnnnnnnnnnnnnnnnnnnnnnnnnnnnnnnnnnnnnnnnnnnnnnnnnnnnnnnnnnnnnnnnnnnnnnnnnnnnnnnnnnnnnnnnnnnnnnnnnnnnnnnnnnnnnnnnnnnnnnnnnnnnnnnnnnnnnnnnnnnnnnnnnnnnnnnnnnnnnnnnnnnnnnnnnnnnnnnnnnnnnnnnnnnnnnnnnnnnnnnnnnnnnnnnnnnnnnnnnnnnnnnnnnnnnnnnnnnnnnnnnnnnnnnnnnnnnnnnnnnnnnnnnnnnnnnnnnnnnnnnnnnnnnnnnnnnnnnnnnnnnnnnnnnnnnnnnnnnnnnnnnnnnnnnnnnnnnnnnnnnnnnnnnnnnnnnnnnnnnnnnnnnnnnnnnnnnnnnnnnnnnnnnnnnnnnnnnnnnnnnnnnnnnnnnnnnnnnnnnnnnnnnnnnnnnnnnnnnnnnnnnnnnnnnnnnnnnnnnnnnnnnnnnnnnnnnnnnnnnnnnnnnnnnnnnnnnnnnnnnnnnnnnnnnnnnnnnnnnnnnnnnnnnnnnnnnnnnnnnnnnnnnnnnnnnnnnnnnnnnnnnnnnnnnnnnnnnnnnnnnnnnnnnnnnnnnnnnnnnnnnnnnnnnnnnnnnnnnnnnnnnnnnnnnnnnnnnnnnnnnnnnnnnnnnnnnnnnnnnnnnnnnnnnnnnnnnnnnnnnnnnnnnnnnnnnnnnnnnnnnnnnnnnnnnnnnnnnnnnnnnnnnnnnnnnnnnnnnnnnnnnnnnnnnnnnnnnnnnnnnnnnnnnnnnnnnnnnnnnnnnnnnnnnnnnnnnnnnnnnnnnnnnnnnnnnnnnnnnnnnnnnnnnnnnnnnnnnnnnnnnnnnnnnnnnnnnnnnnnnnnnnnnnnnnnnnnnnnnnnnnnnnnnnnnnnnnnnnnnnnnnnnnnnnnnnnnnnnnnnnnnnnnnnnnnnnnnnnnnnnnnnnnnnnnnnnnnnnnnnnnnnnnnnnnnnnnnnnnnnnnnnnnnnnnnnnnnnnnnnnnnnnnnnnnnnnnnnnnnnnnnnnnnnnnnnnnnnnnnnnnnnnnnnnnnnnnnnnnnnnnnnnnnnnnnnnnnnnnnnnnnnnnnnnnnnnnnnnnnnnnnnnnnnnnnnnnnnnnnnnnnnnnnnnnnnnnnnnnnnnnnnnnnnnnnnnnnnnnnnnnnnnnnnnnnnnnnnnnnnnnnnnnnnnnnnnnnnnnnnnnnnnnnnnnnnnnnnnnnnnnnnnnnnnnnnnnnnnnnnnnnnnnnnnnnnnnnnnnnnnnnnnnnnnnnnnnnnnnnnnnnnnnnnnnnnnnnnnnnnnnnnnnnnnnnnnnnnnnnnnnnnnnnnnnnnnnnnnnnnnnnnnnnnnnnnnnnnnnnnnnnnnnnnnnnnnnnnnnnnnnnnnnnnnnnnnnnnnnnnnnnnnnnnnnnnnnnnnnnnnnnnnnnnnnnnnnnnnnnnnnnnnnnnnnnnnnnnnnnnnnnnnnnnnnnnnnnnnnnnnnnnnnnnnnnnnnnnnnnnnnnnnnnnnnnnnnnnnnnnnnnnnnnnnnnnnnnnnnnnnnnnnnnnnnnnnnnnnnnnnnnnnnnnnnnnnnnnnnnnnnnnnnnnnnnnnnnnnnnnnnnnnnnnnnnnnnnnnnnnnnnnnnnnnnnnnnnnnnnnnnnnnnnnnnnnnnnnnnnnnnnnnnnnnnnnnnnnnnnnnnnnnnnnnnnnnnnnnnnnnnnnnnnnnnnnnnnnnnnnnnnnnnnnnnnnnnnnnnnnnnnnnnnnnnnnnnnnnnnnnnnnnnnnnnnnnnnnnnnnnnnnnnnnnnnnnnnnnnnnnnnnnnnnnnnnnnnnnnnnnnnnnnnnnnnnnnnnnnnnnnnnnnnnnnnnnnnnnnnnnnnnnnnnnnnnnnnnnnnnnnnnnnnnnnnnnnnnnnnnnnnnnnnnnnnnnnnnnnnnnnnnnnnnnnnnnnnnnnnnnnnnnnnnnnnnnnnnnnnnnnnnnnnnnnnnnnnnnnnnnnnnnnnnnnnnnnnnnnnnnnnnnnnnnnnnnnnnnnnnnnnnnnnnnnnnnnnnnnnnnnnnnnnnnnnnnnnnnnnnnnnnnnnnnnnnnnnnnnnnnnnnnnnnnnnnnnnnnnnnnnnnnnnnnnnnnnnnnnnnnnnnnnnnnnnnnnnnnnnnnnnnnnnnnnnnnnnnnnnnnnnnnnnnnnnnnnnnnnnnnnnnnnnnnnnnnnnnnnnnnnnnnnnnnnnnnnnnnnnnnnnnnnnnnnnnnnnnnnnnnnnnnnnnnnnnnnnnnnnnnnnnnnnnnnnnnnnnnnnnnnnnnnnnnnnnnnnnnnnnnnnnnnnnnnnnnnnnnnnnnnnnnnnnnnnnnnnnnnnnnnnnnnnnnnnnnnnnnnnnnnnnnnnnnnnnnnnnnnnnnnnnnnnnnnnnnnnnnnnnnnnnnnnnnnnnnnnnnnnnnnnnnnnnnnnnnnnnnnnnnnnnnnnnnnnnnnnnnnnnnnnnnnnnnnnnnnnnnnnnnnnnnnnnnnnnnnnnnnnnnnnnnnnnnnnnnnnnnnnnnnnnnnnnnnnnnnnnnnnnnnnnnnnnnnnnnnnnnnnnnnnnnnnnnnnnnnnnnnnnnnnnnnnnnnnnnnnnnnnnnnnnnnnnnnnnnnnnnnnnnnnnnnnnnnnnnnnnnnnnnnnnnnnnnnnnnnnnnnnnnnnnnnnnnnnnnnnnnnnnnnnnnnnnnnnnnnnnnnnnnnnnnnnnnnnnnnnnnnnnnnnnnnnnnnnnnnnnnnnnnnnnnnnnnnnnnnnnnnnnnnnnnnnnnnnnnnnnnnnnnnnnnnnnnnnnnnnnnnnnnnnnnnnnnnnnnnnnnnnnnnnnnnnnnnnnnnnnnnnnnnnnnnnnnnnnnnnnnnnnnnnnnnnnnnnnnnnnnnnnnnnnnnnnnnnnnnnnnnnnnnnnnnnnnnnnnnnnnnnnnnnnnnnnnnnnnnnnnnnnnnnnnnnnnnnnnnnnnnnnnnnnnnnnnnnnnnnnnnnnnnnnnnnnnnnnnnnnnnnnnnnnnnnnnnnnnnnnnnnnnnnnnnnnnnnnnnnnnnnnnnnnnnnnnnnnnnnnnnnnnnnnnnnnnnnnnnnnnnnnnnnnnnnnnnnnnnnnnnnnnnnnnnnnnnnnnnnnnnnnnnnnnnnnnnnnnnnnnnnnnnnnnnnnnnnnnnnnnnnnnnnnnnnnnnnnnnnnnnnnnnnnnnnnnnnnnnnnnnnnnnnnnnnnnnnnnnnnnnnnnnnnnnnnnnnnnnnnnnnnnnnnnnnnnnnnnnnnnnnnnnnnnnnnnnnnnnnnnnnnnnnnnnnnnnnnnnnnnnnnnnnnnnnnnnnnnnnnnnnnnnnnnnnnnnnnnnnnnnnnnnnnnnnnnnnnnnnnnnnnnnnnnnnnnnnnnnnnnnnnnnnnnnnnnnnnnnnnnnnnnnnnnnnnnnnnnnnnnnnnnnnnnnnnnnnnnnnnnnnnnnnnnnnnnnnnnnnnnnnnnnnnnnnnnnnnnnnnnnnnnnnnnnnnnnnnnnnnnnnnnnnnnnnnnnnnnnnnnnnnnnnnnnnnnnnnnnnnnnnnnnnnnnnnnnnnnnnnnnnnnnnnnnnnnnnnnnnnnnnnnnnnnnnnnnnnnnnnnnnnnnnnnnnnnnnnnnnnnnnnnnnnnnnnnnnnnnnnnnnnnnnnnnnnnnnnnnnnnnnnnnnnnnnnnnnnnnnnnnnnnnnnnnnnnnnnnnnnnnnnnnnnnnnnnnnnnnnnnnnnnnnnnnnnnnnnnnnnnnnnnnnnnnnnnnnnnnnnnnnnnnnnnnnnnnnnnnnnnnnnnnnnnnnnnnnnnnnnnnnnnnnnnnnnnnnnnnnnnnnnnnnnnnnnnnnnnnnnnnnnnnnnnnnnnnnnnnnnnnnnnnnnnnnnnnnnnnnnnnnnnnnnnnnnnnnnnnnnnnnnnnnnnnnnnnnnnnnnnnnnnnnnnnnnnnnnnnnnnnnnnnnnnnnnnnnnnnnnnnnnnnnnnnnnnnnnnnnnnnnnnnnnnnnnnnnnnnnnnnnnnnnnnnnnnnnnnnnnnnnnnnnnnnnnnnnnnnnnnnnnnnnnnnnnnnnnnnnnnnnnnnnnnnnnnnnnnnnnnnnnnnnnnnnnnnnnnnnnnnnnnnnnnnnnnnnnnnnnnnnnnnnnnnnnnnnnnnnnnnnnnnnnnnnnnnnnnnnnnnnnnnnnnnnnnnnnnnnnnnnnnnnnnnnnnnnnnnnnnnnnnnnnnnnnnnnnnnnnnnnnnnnnnnnnnnnnnnnnnnnnnnnnnnnnnnnnnnnnnnnnnnnnnnnnnnnnnnnnnnnnnnnnnnnnnnnnnnnnnnnnnnnnnnnnnnnnnnnnnnnnnnnnnnnnnnnnnnnnnnnnnnnnnnnnnnnnnnnnnnnnnnnnnnnnnnnnnnnnnnnnnnnnnnnnnnnnnnnnnnnnnnnnnnnnnnnnnnnnnnnnnnnnnnnnnnnnnnnnnnnnnnnnnnnnnnnnnnnnnnnnnnnnnnnnnnnnnnnnnnnnnnnnnnnnnnnnnnnnnnnnnnnnnnnnnnnnnnnnnnnnnnnnnnnnnnnnnnnnnnnnnnnnnnnnnnnnnnnnnnnnnnnnnnnnnnnnnnnnnnnnnnnnnnnnnnnnnnnnnnnnnnnnnnnnnnnnnnnnnnnnnnnnnnnnnnnnnnnnnnnnnnnnnnnnnnnnnnnnnnnnnnnnnnnnnnnnnnnnnnnnnnnnnnnnnnnnnnnnnnnnnnnnnnnnnnnnnnnnnnnnnnnnnnnnnnnnnnnnnnnnnnnnnnnnnnnnnnnnnnnnnnnnnnnnnnnnnnnnnnnnnnnnnnnnnnnnnnnnnnnnnnnnnnnnnnnnnnnnnnnnnnnnnnnnnnnnnnnnnnnnnnnnnnnnnnnnnnnnnnnnnnnnnnnnnnnnnnnnnnnnnnnnnnnnnnnnnnnnnnnnnnnnnnnnnnnnnnnnnnnnnnnnnnnnnnnnnnnnnnnnnnnnnnnnnnnnnnnnnnnnnnnnnnnnnnnnnnnnnnnnnnnnnnnnnnnnnnnnnnnnnnnnnnnnnnnnnnnnnnnnnnnnnnnnnnnnnnnnnnnnnnnnnnnnnnnnnnnnnnnnnnnnnnnnnnnnnnnnnnnnnnnnnnnnnnnnnnnnnnnnnnnnnnnnnnnnnnnnnnnnnnnnnnnnnnnnnnnnnnnnnnnnnnnnnnnnnnnnnnnnnnnnnnnnnnnnnnnnnnnnnnnnnnnnnnnnnnnnnnnnnnnnnnnnnnnnnnnnnnnnnnnnnnnnnnnnnnnnnnnnnnnnnnnnnnnnnnnnnnnnnnnnnnnnnnnnnnnnnnnnnnnnnnnnnnnnnnnnnnnnnnnnnnnnnnnnnnnnnnnnnnnnnnnnnnnnnnnnnnnnnnnnnnnnnnnnnnnnnnnnnnnnnnnnnnnnnnnnnnnnnnnnnnnnnnnnnnnnnnnnnnnnnnnnnnnnnnnnnnnnnnnnnnnnnnnnnnnnnnnnnnnnnnnnnnnnnnnnnnnnnnnnnnnnnnnnnnnnnnnnnnnnnnnnnnnnnnnnnnnnnnnnnnnnnnnnnnnnnnnnnnnnnnnnnnnnnnnnnnnnnnnnnnnnnnnnnnnnnnnnnnnnnnnnnnnnnnnnnnnnnnnnnnnnnnnnnnnnnnnnnnnnnnnnnnnnnnnnnnnnnnnnnnnnnnnnnnnnnnnnnnnnnnnnnnnnnnnnnnnnnnnnnnnnnnnnnnnnnnnnnnnnnnnnnnnnnnnnnnnnnnnnnnnnnnnnnnnnnnnnnnnnnnnnnnnnnnnnnnnnnnnnnnnnnnnnnnnnnnnnnnnnnnnnnnnnnnnnnnnnnnnnnnnnnnnnnnnnnnnnnnnnnnnnnnnnnnnnnnnnnnnnnnnnnnnnnnnnnnnnnnnnnnnnnnnnnnnnnnnnnnnnnnnnnnnnnnnnnnnnnnnnnnnnnnnnnnnnnnnnnnnnnnnnnnnnnnnnnnnnnnnnnnnnnnnnnnnnnnnnnnnnnnnnnnnnnnnnnnnnnnnnnnnnnnnnnnnnnnnnnnnnnnnnnnnnnnnnnnnnnnnnnnnnnnnnnnnnnnnnnnnnnnnnnnnnnnnnnnnnnnnnnnnnnnnnnnnnnnnnnnnnnnnnnnnnnnnnnnnnnnnnnnnnnnnnnnnnnnnnnnnnnnnnnnnnnnnnnnnnnnnnnnnnnnnnnnnnnnnnnnnnnnnnnnnnnnnnnnnnnnnnnnnnnnnnnnnnnnnnnnnnnnnnnnnnnnnnnnnnnnnnnnnnnnnnnnnnnnnnnnnnnnnnnnnnnnnnnnnnnnnnnnnnnnnnnnnnnnnnnnnnnnnnnnnnnnnnnnnnnnnnnnnnnnnnnnnnnnnnnnnnnnnnnnnnnnnnnnnnnnnnnnnnnnnnnnnnnnnnnnnnnnnnnnnnnnnnnnnnnnnnnnnnnnnnnnnnnnnnnnnnnnnnnnnnnnnnnnnnnnnnnnnnnnnnnnnnnnnnnnnnnnnnnnnnnnnnnnnnnnnnnnnnnnnnnnnnnnnnnnnnnnnnnnnnnnnnnnnnnnnnnnnnnnnnnnnnnnnnnnnnnnnnnnnnnnnnnnnnnnnnnnnnnnnnnnnnnnnnnnnnnnnnnnnnnnnnnnnnnnnnnnnnnnnnnnnnnnnnnnnnnnnnnnnnnnnnnnnnnnnnnnnnnnnnnnnnnnnnnnnnnnnnnnnnnnnnnnnnnnnnnnnnnnnnnnnnnnnnnnnnnnnnnnnnnnnnnnnnnnnnnnnnnnnnnnnnnnnnnnnnnnnnnnnnnnnnnnnnnnnnnnnnnnnnnnnnnnnnnnnnnnnnnnnnnnnnnnnnnnnnnnnnnnnnnnnnnnnnnnnnnnnnnnnnnnnnnnnnnnnnnnnnnnnnnnnnnnnnnnnnnnnnnnnnnnnnnnnnnnnnnnnnnnnnnnnnnnnnnnnnnnnnnnnnnnnnnnnnnnnnnnnnnnnnnnnnnnnnnnnnnnnnnnnnnnnnnnnnnnnnnnnnnnnnnnnnnnnnnnnnnnnnnnnnnnnnnnnnnnnnnnnnnnnnnnnnnnnnnnnnnnnnnnnnnnnnnnnnnnnnnnnnnnnnnnnnnnnnnnnnnnnnnnnnnnnnnnnnnnnnnnnnnnnnnnnnnnnnnnnnnnnnnnnnnnnnnnnnnnnnnnnnnnnnnnnnnnnnnnnnnnnnnnnnnnnnnnnnnnnnnnnnnnnnnnnnnnnnnnnnnnnnnnnnnnnnnnnnnnnnnnnnnnnnnnnnnnnnnnnnnnnnnnnnnnnnnnnnnnnnnnnnnnnnnnnnnnnnnnnnnnnnnnnnnnnnnnnnnnnnnnnnnnnnnnnnnnnnnnnnnnnnnnnnnnnnnnnnnnnnnnnnnnnnnnnnnnnnnnnnnnnnnnnnnnnnnnnnnnnnnnnnnnnnnnnnnnnnnnnnnnnnnnnnnnnnnnnnnnnnnnnnnnnnnnnnnnnnnnnnnnnnnnnnnnnnnnnnnnnnnnnnnnnnnnnnnnnnnnnnnnnnnnnnnnnnnnnnnnnnnnnnnnnnnnnnnnnnnnnnnnnnnnnnnnnnnnnnnnnnnnnnnnnnnnnnnnnnnnnnnnnnnnnnnnnnnnnnnnnnnnnnnnnnnnnnnnnnnnnnnnnnnnnnnnnnnnnnnnnnnnnnnnnnnnnnnnnnnnnnnnnnnnnnnnnnnnnnnnnnnnnnnnnnnnnnnnnnnnnnnnnnnnnnnnnnnnnnnnnnnnnnnnnnnnnnnnnnnnnnnnnnnnnnnnnnnnnnnnnnnnnnnnnnnnnnnnnnnnnnnnnnnnnnnnnnnnnnnnnnnnnnnnnnnnnnnnnnnnnnnnnnnnnnnnnnnnnnnnnnnnnnnnnnnnnnnnnnnnnnnnnnnnnnnnnnnnnnnnnnnnnnnnnnnnnnnnnnnnnnnnnnnnnnnnnnnnnnnnnnnnnnnnnnnnnnnnnnnnnnnnnnnnnnnnnnnnnnnnnnnnnnnnnnnnnnnnnnnnnnnnnnnnnnnnnnnnnnnnnnnnnnnnnnnnnnnnnnnnnnnnnnnnnnnnnnnnnnnnnnnnnnnnnnnnnnnnnnnnnnnnnnnnnnnnnnnnnnnnnnnnnnnnnnnnnnnnnnnnnnnnnnnnnnnnnnnnnnnnnnnnnnnnnnnnnnnnnnnnnnnnnnnnnnnnnnnnnnnnnnnnnnnnnnnnnnnnnnnnnnnnnnnnnnnnnnnnnnnnnnnnnnnnnnnnnnnnnnnnnnnnnnnnnnnnnnnnnnnnnnnnnnnnnnnnnnnnnnnnnnnnnnnnnnnnnnnnnnnnnnnnnnnnnnnnnnnnnnnnnnnnnnnnnnnnnnnnnnnnnnnnnnnnnnnnnnnnnnnnnnnnnnnnnnnnnnnnnnnnnnnnnnnnnnnnnnnnnnnnnnnnnnnnnnnnnnnnnnnnnnnnnnnnnnnnnnnnnnnnnnnnnnnnnnnnnnnnnnnnnnnnnnnnnnnnnnnnnnnnnnnnnnnnnnnnnnnnnnnnnnnnnnnnnnnnnnnnnnnnnnnnnnnnnnnnnnnnnnnnnnnnnnnnnnnnnnnnnnnnnnnnnnnnnnnnnnnnnnnnnnnnnnnnnnnnnnnnnnnnnnnnnnnnnnnnnnnnnnnnnnnnnnnnnnnnnnnnnnnnnnnnnnnnnnnnnnnnnnnnnnnnnnnnnnnnnnnnnnnnnnnnnnnnnnnnnnnnnnnnnnnnnnnnnnnnnnnnnnnnnnnnnnnnnnnnnnnnnnnnnnnnnnnnnnnnnnnnnnnnnnnnnnnnnnnnnnnnnnnnnnnnnnnnnnnnnnnnnnnnnnnnnnnnnnnnnnnnnnnnnnnnnnnnnnnnnnnnnnnnnnnnnnnnnnnnnnnnnnnnnnnnnnnnnnnnnnnnnnnnnnnnnnnnnnnnnnnnnnnnnnnnnnnnnnnnnnnnnnnnnnnnnnnnnnnnnnnnnnnnnnnnnnnnnnnnnnnnnnnnnnnnnnnnnnnnnnnnnnnnnnnnnnnnnnnnnnnnnnnnnnnnnnnnnnnnnnnnnnnnnnnnnnnnnnnnnnnnnnnnnnnnnnnnnnnnnnnnnnnnnnnnnnnnnnnnnnnnnnnnnnnnnnnnnnnnnnnnnnnnnnnnnnnnnnnnnnnnnnnnnnnnnnnnnnnnnnnnnnnnnnnnnnnnnnnnnnnnnnnnnnnnnnnnnnnnnnnnnnnnnnnnnnnnnnnnnnnnnnnnnnnnnnnnnnnnnnnnnnnnnnnnnnnnnnnnnnnnnnnnnnnnnnnnnnnnnnnnnnnnnnnnnnnnnnnnnnnnnnnnnnnnnnnnnnnnnnnnnnnnnnnnnnnnnnnnnnnnnnnnnnnnnnnnnnnnnnnnnnnnnnnnnnnnnnnnnnnnnnnnnnnnnnnnnnnnnnnnnnnnnnnnnnnnnnnnnnnnnnnnnnnnnnnnnnnnnnnnnnnnnnnnnnnnnnnnnnnnnnnnnnnnnnnnnnnnnnnnnnnnnnnnnnnnnnnnnnnnnnnnnnnnnnnnnnnnnnnnnnnnnnnnnnnnnnnnnnnnnnnnnnnnnnnnnnnnnnnnnnnnnnnnnnnnnnnnnnnnnnnnnnnnnnnnnnnnnnnnnnnnnnnnnnnnnnnnnnnnnnnnnnnnnnnnnnnnnnnnnnnnnnnnnnnnnnnnnnnnnnnnnnnnnnnnnnnnnnnnnnnnnnnnnnnnnnnnnnnnnnnnnnnnnnnnnnnnnnnnnnnnnnnnnnnnnnnnnnnnnnnnnnnnnnnnnnnnnnnnnnnnnnnnnnnnnnnnnnnnnnnnnnnnnnnnnnnnnnnnnnnnnnnnnnnnnnnnnnnnnnnnnnnnnnnnnnnnnnnnnnnnnnnnnnnnnnnnnnnnnnnnnnnnnnnnnnnnnnnnnnnnnnnnnnnnnnnnnnnnnnnnnnnnnnnnnnnnnnnnnnnnnnnnnnnnnnnnnnnnnnnnnnnnnnnnnnnnnnnnnnnnnnnnnnnnnnnnnnnnnnnnnnnnnnnnnnnnnnnnnnnnnnnnnnnnnnnnnnnnnnnnnnnnnnnnnnnnnnnnnnnnnnnnnnnnnnnnnnnnnnnnnnnnnnnnnnnnnnnnnnnnnnnnnnnnnnnnnnnnnnnnnnnnnnnnnnnnnnnnnnnnnnnnnnnnnnnnnnnnnnnnnnnnnnnnnnnnnnnnnnnnnnnnnnnnnnnnnnnnnnnnnnnnnnnnnnnnnnnnnnnnnnnnnnnnnnnnnnnnnnnnnnnnnnnnnnnnnnnnnnnnnnnnnnnnnnnnnnnnnnnnnnnnnnnnnnnnnnnnnnnnnnnnnnnnnnnnnnnnnnnnnnnnnnnnnnnnnnnnnnnnnnnnnnnnnnnnnnnnnnnnnnnnnnnnnnnnnnnnnnnnnnnnnnnnnnnnnnnnnnnnnnnnnnnnnnnnnnnnnnnnnnnnnnnnnnnnnnnnnnnnnnnnnnnnnnnnnnnnnnnnnnnnnnnnnnnnnnnnnnnnnnnnnnnnnnnnnnnnnnnnnnnnnnnnnnnnnnnnnnnnnnnnnnnnnnnnnnnnnnnnnnnnnnnnnnnnnnnnnnnnnnnnnnnnnnnnnnnnnnnnnnnnnnnnnnnnnnnnnnnnnnnnnnnnnnnnnnnnnnnnnnnnnnnnnnnnnnnnnnnnnnnnnnnnnnnnnnnnnnnnnnnnnnnnnnnnnnnnnnnnnnnnnnnnnnnnnnnnnnnnnnnnnnnnnnnnnnnnnnnnnnnnnnnnnnnnnnnnnnnnnnnnnnnnnnnnnnnnnnnnnnnnnnnnnnnnnnnnnnnnnnnnnnnnnnnnnnnnnnnnnnnnnnnnnnnnnnnnnnnnnnnnnnnnnnnnnnnnnnnnnnnnnnnnnnnnnnnnnnnnnnnnnnnnnnnnnnnnnnnnnnnnnnnnnnnnnnnnnnnnnnnnnnnnnnnnnnnnnnnnnnnnnnnnnnnnnnnnnnnnnnnnnnnnnnnnnnnnnnnnnnnnnnnnnnnnnnnnnnnnnnnnnnnnnnnnnnnnnnnnnnnnnnnnnnnnnnnnnnnnnnnnnnnnnnnnnnnnnnnnnnnnnnnnnnnnnnnnnnnnnnnnnnnnnnnnnnnnnnnnnnnnnnnnnnnnnnnnnnnnnnnnnnnnnnnnnnnnnnnnnnnnnnnnnnnnnnnnnnnnnnnnnnnnnnnnnnnnnnnnnnnnnnnnnnnnnnnnnnnnnnnnnnnnnnnnnnnnnnnnnnnnnnnnnnnnnnnnnnnnnnnnnnnnnnnnnnnnnnnnnnnnnnnnnnnnnnnnnnnnnnnnnnnnnnnnnnnnnnnnnnnnnnnnnnnnnnnnnnnnnnnnnnnnnnnnnnnnnnnnnnnnnnnnnnnnnnnnnnnnnnnnnnnnnnnnnnnnnnnnnnnnnnnnnnnnnnnnnnnnnnnnnnnnnnnnnnnnnnnnnnnnnnnnnnnnnnnnnnnnnnnnnnnnnnnnnnnnnnnnnnnnnnnnnnnnnnnnnnnnnnnnnnnnnnnnnnnnnnnnnnnnnnnnnnnnnnnnnnnnnnnnnnnnnnnnnnnnnnnnnnnnnnnnnnnnnnnnnnnnnnnnnnnnnnnnnnnnnnnnnnnnnnnnnnnnnnnnnnnnnnnnnnnnnnnnnnnnnnnnnnnnnnnnnnnnnnnnnnnnnnnnnnnnnnnnnnnnnnnnnnnnnnnnnnnnnnnnnnnnnnnnnnnnnnnnnnnnnnnnnnnnnnnnnnnnnnnnnnnnnnnnnnnnnnnnnnnnnnnnnnnnnnnnnnnnnnnnnnnnnnnnnnnnnnnnnnnnnnnnnnnnnnnnnnnnnnnnnnnnnnnnnnnnnnnnnnnnnnnnnnnnnnnnnnnnnnnnnnnnnnnnnnnnnnnnnnnnnnnnnnnnnnnnnnnnnnnnnnnnnnnnnnnnnnnnnnnnnnnnnnnnnnnnnnnnnnnnnnnnnnnnnnnnnnnnnnnnnnnnnnnnnnnnnnnnnnnnnnnnnnnnnnnnnnnnnnnnnnnnnnnnnnnnnnnnnnnnnnnnnnnnnnnnnnnnnnnnnnnnnnnnnnnnnnnnnnnnnnnnnnnnnnnnnnnnnnnnnnnnnnnnnnnnnnnnnnnnnnnnnnnnnnnnnnnnnnnnnnnnnnnnnnnnnnnnnnnnnnnnnnnnnnnnnnnnnnnnnnnnnnnnnnnnnnnnnnnnnnnnnnnnnnnnnnnnnnnnnnnnnnnnnnnnnnnnnnnnnnnnnnnnnnnnnnnnnnnnnnnnnnnnnnnnnnnnnnnnnnnnnnnnnnnnnnnnnnnnnnnnnnnnnnnnnnnnnnnnnnnnnnnnnnnnnnnnnnnnnnnnnnnnnnnnnnnnnnnnnnnnnnnnnnnnnnnnnnnnnnnnnnnnnnnnnnnnnnnnnnnnnnnnnnnnnnnnnnnnnnnnnnnnnnnnnnnnnnnnnnnnnnnnnnnnnnnnnnnnnnnnnnnnnnnnnnnnnnnnnnnnnnnnnnnnnnnnnnnnnnnnnnnnnnnnnnnnnnnnnnnnnnnnnnnnnnnnnnnnnnnnnnnnnnnnnnnnnnnnnnnnnnnnnnnnnnnnnnnnnnnnnnnnnnnnnnnnnnnnnnnnnnnnnnnnnnnnnnnnnnnnnnnnnnnnnnnnnnnnnnnnnnnnnnnnnnnnnnnnnnnnnnnnnnnnnnnnnnnnnnnnnnnnnnnnnnnnnnnnnnnnnnnnnnnnnnnnnnnnnnnnnnnnnnnnnnnnnnnnnnnnnnnnnnnnnnnnnnnnnnnnnnnnnnnnnnnnnnnnnnnnnnnnnnnnnnnnnnnnnnnnnnnnnnnnnnnnnnnnnnnnnnnnnnnnnnnnnnnnnnnnnnnnnnnnnnnnnnnnnnnnnnnnnnnnnnnnnnnnnnnnnnnnnnnnnnnnnnnnnnnnnnnnnnnnnnnnnnnnnnnnnnnnnnnnnnnnnnnnnnnnnnnnnnnnnnnnnnnnnnnnnnnnnnnnnnnnnnnnnnnnnnnnnnnnnnnnnnnnnnnnnnnnnnnnnnnnnnnnnnnnnnnnnnnnnnnnnnnnnnnnnnnnnnnnnnnnnnnnnnnnnnnnnnnnnnnnnnnnnnnnnnnnnnnnnnnnnnnnnnnnnnnnnnnnnnnnnnnnnnnnnnnnnnnnnnnnnnnnnnnnnnnnnnnnnnnnnnnnnnnnnnnnnnnnnnnnnnnnnnnnnnnnnnnnnnnnnnnnnnnnnnnnnnnnnnnnnnnnnnnnnnnnnnnnnnnnnnnnnnnnnnnnnnnnnnnnnnnnnnnnnnnnnnnnnnnnnnnnnnnnnnnnnnnnnnnnnnnnnnnnnnnnnnnnnnnnnnnnnnnnnnnnnnnnnnnnnnnnnnnnnnnnnnnnnnnnnnnnnnnnnnnnnnnnnnnnnnnnnnnnnnnnnnnnnnnnnnnnnnnnnnnnnnnnnnnnnnnnnnnnnnnnnnnnnnnnnnnnnnnnnnnnnnnnnnnnnnnnnnnnnnnnnnnnnnnnnnnnnnnnnnnnnnnnnnnnnnnnnnnnnnnnnnnnnnnnnnnnnnnnnnnnnnnnnnnnnnnnnnnnnnnnnnnnnnnnnnnnnnnnnnnnnnnnnnnnnnnnnnnnnnnnnnnnnnnnnnnnnnnnnnnnnnnnnnnnnnnnnnnnnnnnnnnnnnnnnnnnnnnnnnnnnnnnnnnnnnnnnnnnnnnnnnnnnnnnnnnnnnnnnnnnnnnnnnnnnnnnnnnnnnnnnnnnnnnnnnnnnnnnnnnnnnnnnnnnnnnnnnnnnnnnnnnnnnnnnnnnnnnnnnnnnnnnnnnnnnnnnnnnnnnnnnnnnnnnnnnnnnnnnnnnnnnnnnnnnnnnnnnnnnnnnnnnnnnnnnnnnnnnnnnnnnnnnnnnnnnnnnnnnnnnnnnnnnnnnnnnnnnnnnnnnnnnnnnnnnnnnnnnnnnnnnnnnnnnnnnnnnnnnnnnnnnnnnnnnnnnnnnnnnnnnnnnnnnnnnnnnnnnnnnnnnnnnnnnnnnnnnnnnnnnnnnnnnnnnnnnnnnnnnnnnnnnnnnnnnnnnnnnnnnnnnnnnnnnnnnnnnnnnnnnnnnnnnnnnnnnnnnnnnnnnnnnnnnnnnnnnnnnnnnnnnnnnnnnnnnnnnnnnnnnnnnnnnnnnnnnnnnnnnnnnnnnnnnnnnnnnnnnnnnnnnnnnnnnnnnnnnnnnnnnnnnnnnnnnnnnnnnnnnnnnnnnnnnnnnnnnnnnnnnnnnnnnnnnnnnnnnnnnnnnnnnnnnnnnnnnnnnnnnnnnnnnnnnnnnnnnnnnnnnnnnnnnnnnnnnnnnnnnnnnnnnnnnnnnnnnnnnnnnnnnnnnnnnnnnnnnnnnnnnnnnnnnnnnnnnnnnnnnnnnnnnnnnnnnnnnnnnnnnnnnnnnnnnnnnnnnnnnnnnnnnnnnnnnnnnnnnnnnnnnnnnnnnnnnnnnnnnnnnnnnnnnnnnnnnnnnnnnnnnnnnnnnnnnnnnnnnnnnnnnnnnnnnnnnnnnnnnnnnnnnnnnnnnnnnnnnnnnnnnnnnnnnnnnnnnnnnnnnnnnnnnnnnnnnnnnnnnnnnnnnnnnnnnnnnnnnnnnnnnnnnnnnnnnnnnnnnnnnnnnnnnnnnnnnnnnnnnnnnnnnnnnnnnnnnnnnnnnnnnnnnnnnnnnnnnnnnnnnnnnnnnnnnnnnnnnnnnnnnnnnnnnnnnnnnnnnnnnnnnnnnnnnnnnnnnnnnnnnnnnnnnnnnnnnnnnnnnnnnnnnnnnnnnnnnnnnnnnnnnnnnnnnnnnnnnnnnnnnnnnnnnnnnnnnnnnnnnnnnnnnnnnnnnnnnnnnnnnnnnnnnnnnnnnnnnnnnnnnnnnnnnnnnnnnnnnnnnnnnnnnnnnnnnnnnnnnnnnnnnnnnnnnnnnnnnnnnnnnnnnnnnnnnnnnnnnnnnnnnnnnnnnnnnnnnnnnnnnnnnnnnnnnnnnnnnnnnnnnnnnnnnnnnnnnnnnnnnnnnnnnnnnnnnnnnnnnnnnnnnnnnnnnnnnnnnnnnnnnnnnnnnnnnnnnnnnnnnnnnnnnnnnnnnnnnnnnnnnnnnnnnnnnnnnnnnnnnnnnnnnnnnnnnnnnnnnnnnnnnnnnnnnnnnnnnnnnnnnnnnnnnnnnnnnnnnnnnnnnnnnnnnnnnnnnnnnnnnnnnnnnnnnnnnnnnnnnnnnnnnnnnnnnnnnnnnnnnnnnnnnnnnnnnnnnnnnnnnnnnnnnnnnnnnnnnnnnnnnnnnnnnnnnnnnnnnnnnnnnnnnnnnnnnnnnnnnnnnnnnnnnnnnnnnnnnnnnnnnnnnnnnnnnnnnnnnnnnnnnnnnnnnnnnnnnnnnnnnnnnnnnnnnnnnnnnnnnnnnnnnnnnnnnnnnnnnnnnnnnnnnnnnnnnnnnnnnnnnnnnnnnnnnnnnnnnnnnnnnnnnnnnnnnnnnnnnnnnnnnnnnnnnnnnnnnnnnnnnnnnnnnnnnnnnnnnnnnnnnnnnnnnnnnnnnnnnnnnnnnnnnnnnnnnnnnnnnnnnnnnnnnnnnnnnnnnnnnnnnnnnnnnnnnnnnnnnnnnnnnnnnnnnnnnnnnnnnnnnnnnnnnnnnnnnnnnnnnnnnnnnnnnnnnnnnnnnnnnnnnnnnnnnnnnnnnnnnnnnnnnnnnnnnnnnnnnnnnnnnnnnnnnnnnnnnnnnnnnnnnnnnnnnnnnnnnnnnnnnnnnnnnnnnnnnnnnnnnnnnnnnnnnnnnnnnnnnnnnnnnnnnnnnnnnnnnnnnnnnnnnnnnnnnnnnnnnnnnnnnnnnnnnnnnnnnnnnnnnnnnnnnnnnnnnnnnnnnnnnnnnnnnnnnnnnnnnnnnnnnnnnnnnnnnnnnnnnnnnnnnnnnnnnnnnnnnnnnnnnnnnnnnnnnnnnnnnnnnnnnnnnnnnnnnnnnnnnnnnnnnnnnnnnnnnnnnnnnnnnnnnnnnnnnnnnnnnnnnnnnnnnnnnnnnnnnnnnnnnnnnnnnnnnnnnnnnnnnnnnnnnnnnnnnnnnnnnnnnnnnnnnnnnnnnnnnnnnnnnnnnnnnnnnnnnnnnnnnnnnnnnnnnnnnnnnnnnnnnnnnnnnnnnnnnnnnnnnnnnnnnnnnnnnnnnnnnnnnnnnnnnnnnnnnnnnnnnnnnnnnnnnnnnnnnnnnnnnnnnnnnnnnnnnnnnnnnnnnnnnnnnnnnnnnnnnnnnnnnnnnnnnnnnnnnnnnnnnnnnnnnnnnnnnnnnnnnnnnnnnnnnnnnnnnnnnnnnnnnnnnnnnnnnnnnnnnnnnnnnnnnnnnnnnnnnnnnnnnnnnnnnnnnnnnnnnnnnnnnnnnnnnnnnnnnnnnnnnnnnnnnnnnnnnnnnnnnnnnnnnnnnnnnnnnnnnnnnnnnnnnnnnnnnnnnnnnnnnnnnnnnnnnnnnnnnnnnnnnnnnnnnnnnnnnnnnnnnnnnnnnnnnnnnnnnnnnnnnnnnnnnnnnnnnnnnnnnnnnnnnnnnnnnnnnnnnnnnnnnnnnnnnnnnnnnnnnnnnnnnnnnnnnnnnnnnnnnnnnnnnnnnnnnnnnnnnnnnnnnnnnnnnnnnnnnnnnnnnnnnnnnnnnnnnnnnnnnnnnnnnnnnnnnnnnnnnnnnnnnnnnnnnnnnnnnnnnnnnnnnnnnnnnnnnnnnnnnnnnnnnnnnnnnnnnnnnnnnnnnnnnnnnnnnnnnnnnnnnnnnnnnnnnnnnnnnnnnnnnnnnnnnnnnnnnnnnnnnnnnnnnnnnnnnnnnnnnnnnnnnnnnnnnnnnnnnnnnnnnnnnnnnnnnnnnnnnnnnnnnnnnnnnnnnnnnnnnnnnnnnnnnnnnnnnnnnnnnnnnnnnnnnnnnnnnnnnnnnnnnnnnnnnnnnnnnnnnnnnnnnnnnnnnnnnnnnnnnnnnnnnnnnnnnnnnnnnnnnnnnnnnnnnnnnnnnnnnnnnnnnnnnnnnnnnnnnnnnnnnnnnnnnnnnnnnnnnnnnnnnnnnnnnnnnnnnnnnnnnnnnnnnnnnnnnnnnnnnnnnnnnnnnnnnnnnnnnnnnnnnnnnnnnnnnnnnnnnnnnnnnnnnnnnnnnnnnnnnnnnnnnnnnnnnnnnnnnnnnnnnnnnnnnnnnnnnnnnnnnnnnnnnnnnnnnnnnnnnnnnnnnnnnnnnnnnnnnnnnnnnnnnnnnnnnnnnnnnnnnnnnnnnnnnnnnnnnnnnnnnnnnnnnnnnnnnnnnnnnnnnnnnnnnnnnnnnnnnnnnnnnnnnnnnnnnnnnnnnnnnnnnnnnnnnnnnnnnnnnnnnnnnnnnnnnnnnnnnnnnnnnnnnnnnnnnnnnnnnnnnnnnnnnnnnnnnnnnnnnnnnnnnnnnnnnnnnnnnnnnnnnnnnnnnnnnnnnnnnnnnnnnnnnnnnnnnnnnnnnnnnnnnnnnnnnnnnnnnnnnnnnnnnnnnnnnnnnnnnnnnnnnnnnnnnnnnnnnnnnnnnnnnnnnnnnnnnnnnnnnnnnnnnnnnnnnnnnnnnnnnnnnnnnnnnnnnnnnnnnnnnnnnnnnnnnnnnnnnnnnnnnnnnnnnnnnnnnnnnnnnnnnnnnnnnnnnnnnnnnnnnnnnnnnnnnnnnnnnnnnnnnnnnnnnnnnnnnnnnnnnnnnnnnnnnnnnnnnnnnnnnnnnnnnnnnnnnnnnnnnnnnnnnnnnnnnnnnnnnnnnnnnnnnnnnnnnnnnnnnnnnnnnnnnnnnnnnnnnnnnnnnnnnnnnnnnnnnnnnnnnnnnnnnnnnnnnnnnnnnnnnnnnnnnnnnnnnnnnnnnnnnnnnnnnnnnnnnnnnnnnnnnnnnnnnnnnnnnnnnnnnnnnnnnnnnnnnnnnnnnnnnnnnnnnnnnnnnnnnnnnnnnnnnnnnnnnnnnnnnnnnnnnnnnnnnnnnnnnnnnnnnnnnnnnnnnnnnnnnnnnnnnnnnnnnnnnnnnnnnnnnnnnnnnnnnnnnnnnnnnnnnnnnnnnnnnnnnnnnnnnnnnnnnnnnnnnnnnnnnnnnnnnnnnnnnnnnnnnnnnnnnnnnnnnnnnnnnnnnnnnnnnnnnnnnnnnnnnnnnnnnnnnnnnnnnnnnnnnnnnnnnnnnnnnnnnnnnnnnnnnnnnnnnnnnnnnnnnnnnnnnnnnnnnnnnnnnnnnnnnnnnnnnnnnnnnnnnnnnnnnnnnnnnnnnnnnnnnnnnnnnnnnnnnnnnnnnnnnnnnnnnnnnnnnnnnnnnnnnnnnnnnnnnnnnnnnnnnnnnnnnnnnnnnnnnnnnnnnnnnnnnnnnnnnnnnnnnnnnnnnnnnnnnnnnnnnnnnnnnnnnnnnnnnnnnnnnnnnnnnnnnnnnnnnnnnnnnnnnnnnnnnnnnnnnnnnnnnnnnnnnnnnnnnnnnnnnnnnnnnnnnnnnnnnnnnnnnnnnnnnnnnnnnnnnnnnnnnnnnnnnnnnnnnnnnnnnnnnnnnnnnnnnnnnnnnnnnnnnnnnnnnnnnnnnnnnnnnnnnnnnnnnnnnnnnnnnnnnnnnnnnnnnnnnnnnnnnnnnnnnnnnnnnnnnnnnnnnnnnnnnnnnnnnnnnnnnnnnnnnnnnnnnnnnnnnnnnnnnnnnnnnnnnnnnnnnnnnnnnnnnnnnnnnnnnnnnnnnnnnnnnnnnnnnnnnnnnnnnnnnnnnnnnnnnnnnnnnnnnnnnnnnnnnnnnnnnnnnnnnnnnnnnnnnnnnnnnnnnnnnnnnnnnnnnnnnnnnnnnnnnnnnnnnnnnnnnnnnnnnnnnnnnnnnnnnnnnnnnnnnnnnnnnnnnnnnnnnnnnnnnnnnnnnnnnnnnnnnnnnnnnnnnnnnnnnnnnnnnnnnnnnnnnnnnnnnnnnnnnnnnnnnnnnnnnnnnnnnnnnnnnnnnnnnnnnnnnnnnnnnnnnnnnnnnnnnnnnnnnnnnnnnnnnnnnnnnnnnnnnnnnnnnnnnnnnnnnnnnnnnnnnnnnnnnnnnnnnnnnnnnnnnnnnnnnnnnnnnnnnnnnnnnnnnnnnnnnnnnnnnnnnnnnnnnnnnnnnnnnnnnnnnnnnnnnnnnnnnnnnnnnnnnnnnnnnnnnnnnnnnnnnnnnnnnnnnnnnnnnnnnnnnnnnnnnnnnnnnnnnnnnnnnnnnnnnnnnnnnnnnnnnnnnnnnnnnnnnnnnnnnnnnnnnnnnnnnnnnnnnnnnnnnnnnnnnnnnnnnnnnnnnnnnnnnnnnnnnnnnnnnnnnnnnnnnnnnnnnnnnnnnnnnnnnnnnnnnnnnnnnnnnnnnnnnnnnnnnnnnnnnnnnnnnnnnnnnnnnnnnnnnnnnnnnnnnnnnnnnnnnnnnnnnnnnnnnnnnnnnnnnnnnnnnnnnnnnnnnnnnnnnnnnnnnnnnnnnnnnnnnnnnnnnnnnnnnnnnnnnnnnnnnnnnnnnnnnnnnnnnnnnnnnnnnnnnnnnnnnnnnnnnnnnnnnnnnnnnnnnnnnnnnnnnnnnnnnnnnnnnnnnnnnnnnnnnnnnnnnnnnnnnnnnnnnnnnnnnnnnnnnnnnnnnnnnnnnnnnnnnnnnnnnnnnnnnnnnnnnnnnnnnnnnnnnnnnnnnnnnnnnnnnnnnnnnnnnnnnnnnnnnnnnnnnnnnnnnnnnnnnnnnnnnnnnnnnnnnnnnnnnnnnnnnnnnnnnnnnnnnnnnnnnnnnnnnnnnnnnnnnnnnnnnnnnnnnnnnnnnnnnnnnnnnnnnnnnnnnnnnnnnnnnnnnnnnnnnnnnnnnnnnnnnnnnnnnnnnnnnnnnnnnnnnnnnnnnnnnnnnnnnnnnnnnnnnnnnnnnnnnnnnnnnnnnnnnnnnnnnnnnnnnnnnnnnnnnnnnnnnnnnnnnnnnnnnnnnnnnnnnnnnnnnnnnnnnnnnnnnnnnnnnnnnnnnnnnnnnnnnnnnnnnnnnnnnnnnnnnnnnnnnnnnnnnnnnnnnnnnnnnnnnnnnnnnnnnnnnnnnnnnnnnnnnnnnnnnnnnnnnnnnnnnnnnnnnnnnnnnnnnnnnnnnnnnnnnnnnnnnnnnnnnnnnnnnnnnnnnnnnnnnnnnnnnnnnnnnnnnnnnnnnnnnnnnnnnnnnnnnnnnnnnnnnnnnnnnnnnnnnnnnnnnnnnnnnnnnnnnnnnnnnnnnnnnnnnnnnnnnnnnnnnnnnnnnnnnnnnnnnnnnnnnnnnnnnnnnnnnnnnnnnnnnnnnnnnnnnnnnnnnnnnnnnnnnnnnnnnnnnnnnnnnnnnnnnnnnnnnnnnnnnnnnnnnnnnnnnnnnnnnnnnnnnnnnnnnnnnnnnnnnnnnnnnnnnnnnnnnnnnnnnnnnnnnnnnnnnnnnnnnnnnnnnnnnnnnnnnnnnnnnnnnnnnnnnnnnnnnnnnnnnnnnnnnnnnnnnnnnnnnnnnnnnnnnnnnnnnnnnnnnnnnnnnnnnnnnnnnnnnnnnnnnnnnnnnnnnnnnnnnnnnnnnnnnnnnnnnnnnnnnnnnnnnnnnnnnnnnnnnnnnnnnnnnnnnnnnnnnnnnnnnnnnnnnnnnnnnnnnnnnnnnnnnnnnnnnnnnnnnnnnnnnnnnnnnnnnnnnnnnnnnnnnnnnnnnnnnnnnnnnnnnnnnnnnnnnnnnnnnnnnnnnnnnnnnnnnnnnnnnnnnnnnnnnnnnnnnnnnnnnnnnnnnnnnnnnnnnnnnnnnnnnnnnnnnnnnnnnnnnnnnnnnnnnnnnnnnnnnnnnnnnnnnnnnnnnnnnnnnnnnnnnnnnnnnnnnnnnnnnnnnnnnnnnnnnnnnnnnnnnnnnnnnnnnnnnnnnnnnnnnnnnnnnnnnnnnnnnnnnnnnnnnnnnnnnnnnnnnnnnnnnnnnnnnnnnnnnnnnnnnnnnnnnnnnnnnnnnnnnnnnnnnnnnnnnnnnnnnnnnnnnnnnnnnnnnnnnnnnnnnnnnnnnnnnnnnnnnnnnnnnnnnnnnnnnnnnnnnnnnnnnnnnnnnnnnnnnnnnnnnnnnnnnnnnnnnnnnnnnnnnnnnnnnnnnnnnnnnnnnnnnnnnnnnnnnnnnnnnnnnnnnnnnnnnnnnnnnnnnnnnnnnnnnnnnnnnnnnnnnnnnnnnnnnnnnnnnnnnnnnnnnnnnnnnnnnnnnnnnnnnnnnnnnnnnnnnnnnnnnnnnnnnnnnnnnnnnnnnnnnnnnnnnnnnnnnnnnnnnnnnnnnnnnnnnnnnnnnnnnnnnnnnnnnnnnnnnnnnnnnnnnnnnnnnnnnnnnnnnnnnnnnnnnnnnnnnnnnnnnnnnnnnnnnnnnnnnnnnnnnnnnnnnnnnnnnnnnnnnnnnnnnnnnnnnnnnnnnnnnnnnnnnnnnnnnnnnnnnnnnnnnnnnnnnnnnnnnnnnnnnnnnnnnnnnnnnnnnnnnnnnnnnnnnnnnnnnnnnnnnnnnnnnnnnnnnnnnnnnnnnnnnnnnnnnnnnnnnnnnnnnnnnnnnnnnnnnnnnnnnnnnnnnnnnnnnnnnnnnnnnnnnnnnnnnnnnnnnnnnnnnnnnnnnnnnnnnnnnnnnnnnnnnnnnnnnnnnnnnnnnnnnnnnnnnnnnnnnnnnnnnnnnnnnnnnnnnnnnnnnnnnnnnnnnnnnnnnnnnnnnnnnnnnnnnnnnnnnnnnnnnnnnnnnnnnnnnnnnnnnnnnnnnnnnnnnnnnnnnnnnnnnnnnnnnnnnnnnnnnnnnnnnnnnnnnnnnnnnnnnnnnnnnnnnnnnnnnnnnnnnnnnnnnnnnnnnnnnnnnnnnnnnnnnnnnnnnnnnnnnnnnnnnnnnnnnnnnnnnnnnnnnnnnnnnnnnnnnnnnnnnnnnnnnnnnnnnnnnnnnnnnnnnnnnnnnnnnnnnnnnnnnnnnnnnnnnnnnnnnnnnnnnnnnnnnnnnnnnnnnnnnnnnnnnnnnnnnnnnnnnnnnnnnnnnnnnnnnnnnnnnnnnnnnnnnnnnnnnnnnnnnnnnnnnnnnnnnnnnnnnnnnnnnnnnnnnnnnnnnnnnnnnnnnnnnnnnnnnnnnnnnnnnnnnnnnnnnnnnnnnnnnnnnnnnnnnnnnnnnnnnnnnnnnnnnnnnnnnnnnnnnnnnnnnnnnnnnnnnnnnnnnnnnnnnnnnnnnnnnnnnnnnnnnnnnnnnnnnnnnnnnnnnnnnnnnnnnnnnnnnnnnnnnnnnnnnnnnnnnnnnnnnnnnnnnnnnnnnnnnnnnnnnnnnnnnnnnnnnnnnnnnnnnnnnnnnnnnnnnnnnnnnnnnnnnnnnnnnnnnnnnnnnnnnnnnnnnnnnnnnnnnnnnnnnnnnnnnnnnnnnnnnnnnnnnnnnnnnnnnnnnnnnnnnnnnnnnnnnnnnnnnnnnnnnnnnnnnnnnnnnnnnnnnnnnnnnnnnnnnnnnnnnnnnnnnnnnnnnnnnnnnnnnnnnnnnnnnnnnnnnnnnnnnnnnnnnnnnnnnnnnnnnnnnnnnnnnnnnnnnnnnnnnnnnnnnnnnnnnnnnnnnnnnnnnnnnnnnnnnnnnnnnnnnnnnnnnnnnnnnnnnnnnnnnnnnnnnnnnnnnnnnnnnnnnnnnnnnnnnnnnnnnnnnnnnnnnnnnnnnnnnnnnnnnnnnnnnnnnnnnnnnnnnnnnnnnnnnnnnnnnnnnnnnnnnnnnnnnnnnnnnnnnnnnnnnnnnnnnnnnnnnnnnnnnnnnnnnnnnnnnnnnnnnnnnnnnnnnnnnnnnnnnnnnnnnnnnnnnnnnnnnnnnnnnnnnnnnnnnnnnnnnnnnnnnnnnnnnnnnnnnnnnnnnnnnnnnnnnnnnnnnnnnnnnnnnnnnnnnnnnnnnnnnnnnnnnnnnnnnnnnnnnnnnnnnnnnnnnnnnnnnnnnnnnnnnnnnnnnnnnnnnnnnnnnnnnnnnnnnnnnnnnnnnnnnnnnnnnnnnnnnnnnnnnnnnnnnnnnnnnnnnnnnnnnnnnnnnnnnnnnnnnnnnnnnnnnnnnnnnnnnnnnnnnnnnnnnnnnnnnnnnnnnnnnnnnnnnnnnnnnnnnnnnnnnnnnnnnnnnnnnnnnnnnnnnnnnnnnnnnnnnnnnnnnnnnnnnnnnnnnnnnnnnnnnnnnnnnnnnnnnnnnnnnnnnnnnnnnnnnnnnnnnnnnnnnnnnnnnnnnnnnnnnnnnnnnnnnnnnnnnnnnnnnnnnnnnnnnnnnnnnnnnnnnnnnnnnnnnnnnnnnnnnnnnnnnnnnnnnnnnnnnnnnnnnnnnnnnnnnnnnnnnnnnnnnnnnnnnnnnnnnnnnnnnnnnnnnnnnnnnnnnnnnnnnnnnnnnnnnnnnnnnnnnnnnnnnnnnnnnnnnnnnnnnnnnnnnnnnnnnnnnnnnnnnnnnnnnnnnnnnnnnnnnnnnnnnnnnnnnnnnnnnnnnnnnnnnnnnnnnnnnnnnnnnnnnnnnnnnnnnnnnnnnnnnnnnnnnnnnnnnnnnnnnnnnnnnnnnnnnnnnnnnnnnnnnnnnnnnnnnnnnnnnnnnnnnnnnnnnnnnnnnnnnnnnnnnnnnnnnnnnnnnnnnnnnnnnnnnnnnnnnnnnnnnnnnnnnnnnnnnnnnnnnnnnnnnnnnnnnnnnnnnnnnnnnnnnnnnnnnnnnnnnnnnnnnnnnnnnnnnnnnnnnnnnnnnnnnnnnnnnnnnnnnnnnnnnnnnnnnnnnnnnnnnnnnnnnnnnnnnnnnnnnnnnnnnnnnnnnnnnnnnnnnnnnnnnnnnnnnnnnnnnnnnnnnnnnnnnnnnnnnnnnnnnnnnnnnnnnnnnnnnnnnnnnnnnnnnnnnnnnnnnnnnnnnnnnnnnnnnnnnnnnnnnnnnnnnnnnnnnnnnnnnnnnnnnnnnnnnnnnnnnnnnnnnnnnnnnnnnnnnnnnnnnnnnnnnnnnnnnnnnnnnnnnnnnnnnnnnnnnnnnnnnnnnnnnnnnnnnnnnnnnnnnnnnnnnnnnnnnnnnnnnnnnnnnnnnnnnnnnnnnnnnnnnnnnnnnnnnnnnnnnnnnnnnnnnnnnnnnnnnnnnnnnnnnnnnnnnnnnnnnnnnnnnnnnnnnnnnnnnnnnnnnnnnnnnnnnnnnnnnnnnnnnnnnnnnnnnnnnnnnnnnnnnnnnnnnnnnnnnnnnnnnnnnnnnnnnnnnnnnnnnnnnnnnnnnnnnnnnnnnnnnnnnnnnnnnnnnnnnnnnnnnnnnnnnnnnnnnnnnnnnnnnnnnnnnnnnnnnnnnnnnnnnnnnnnnnnnnnnnnnnnnnnnnnnnnnnnnnnnnnnnnnnnnnnnnnnnnnnnnnnnnnnnnnnnnnnnnnnnnnnnnnnnnnnnnnnnnnnnnnnnnnnnnnnnnnnnnnnnnnnnnnnnnnnnnnnnnnnnnnnnnnnnnnnnnnnnnnnnnnnnnnnnnnnnnnnnnnnnnnnnnnnnnnnnnnnnnnnnnnnnnnnnnnnnnnnnnnnnnnnnnnnnnnnnnnnnnnnnnnnnnnnnnnnnnnnnnnnnnnnnnnnnnnnnnnnnnnnnnnnnnnnnnnnnnnnnnnnnnnnnnnnnnnnnnnnnnnnnnnnnnnnnnnnnnnnnnnnnnnnnnnnnnnnnnnnnnnnnnnnnnnnnnnnnnnnnnnnnnnnnnnnnnnnnnnnnnnnnnnnnnnnnnnnnnnnnnnnnnnnnnnnnnnnnnnnnnnnnnnnnnnnnnnnnnnnnnnnnnnnnnnnnnnnnnnnnnnnnnnnnnnnnnnnnnnnnnnnnnnnnnnnnnnnnnnnnnnnnnnnnnnnnnnnnnnnnnnnnnnnnnnnnnnnnnnnnnnnnnnnnnnnnnnnnnnnnnnnnnnnnnnnnnnnnnnnnnnnnnnnnnnnnnnnnnnnnnnnnnnnnnnnnnnnnnnnnnnnnnnnnnnnnnnnnnnnnnnnnnnnnnnnnnnnnnnnnnnnnnnnnnnnnnnnnnnnnnnnnnnnnnnnnnnnnnnnnnnnnnnnnnnnnnnnnnnnnnnnnnnnnnnnnnnnnnnnnnnnnnnnnnnnnnnnnnnnnnnnnnnnnnnnnnnnnnnnnnnnnnnnnnnnnnnnnnnnnnnnnnnnnnnnnnnnnnnnnnnnnnnnnnnnnnnnnnnnnnnnnnnnnnnnnnnnnnnnnnnnnnnnnnnnnnnnnnnnnnnnnnnnnnnnnnnnnnnnnnnnnnnnnnnnnnnnnnnnnnnnnnnnnnnnnnnnnnnnnnnnnnnnnnnnnnnnnnnnnnnnnnnnnnnnnnnnnnnnnnnnnnnnnnnnnnnnnnnnnnnnnnnnnnnnnnnnnnnnnnnnnnnnnnnnnnnnnnnnnnnnnnnnnnnnnnnnnnnnnnnnnnnnnnnnnnnnnnnnnnnnnnnnnnnnnnnnnnnnnnnnnnnnnnnnnnnnnnnnnnnnnnnnnnnnnnnnnnnnnnnnnnnnnnnnnnnnnnnnnnnnnnnnnnnnnnnnnnnnnnnnnnnnnnnnnnnnnnnnnnnnnnnnnnnnnnnnnnnnnnnnnnnnnnnnnnnnnnnnnnnnnnnnnnnnnnnnnnnnnnnnnnnnnnnnnnnnnnnnnnnnnnnnnnnnnnnnnnnnnnnnnnnnnnnnnnnnnnnnnnnnnnnnnnnnnnnnnnnnnnnnnnnnnnnnnnnnnnnnnnnnnnnnnnnnnnnnnnnnnnnnnnnnnnnnnnnnnnnnnnnnnnnnnnnnnnnnnnnnnnnnnnnnnnnnnnnnnnnnnnnnnnnnnnnnnnnnnnnnnnnnnnnnnnnnnnnnnnnnnnnnnnnnnnnnnnnnnnnnnnnnnnnnnnnnnnnnnnnnnnnnnnnnnnnnnnnnnnnnnnnnnnnnnnnnnnnnnnnnnnnnnnnnnnnnnnnnnnnnnnnnnnnnnnnnnnnnnnnnnnnnnnnnnnnnnnnnnnnnnnnnnnnnnnnnnnnnnnnnnnnnnnnnnnnnnnnnnnnnnnnnnnnnnnnnnnnnnnnnnnnnnnnnnnnnnnnnnnnnnnnnnnnnnnnnnnnnnnnnnnnnnnnnnnnnnnnnnnnnnnnnnnnnnnnnnnnnnnnnnnnnnnnnnnnnnnnnnnnnnnnnnnnnnnnnnnnnnnnnnnnnnnnnnnnnnnnnnnnnnnnnnnnnnnnnnnnnnnnnnnnnnnnnnnnnnnnnnnnnnnnnnnnnnnnnnnnnnnnnnnnnnnnnnnnnnnnnnnnnnnnnnnnnnnnnnnnnnnnnnnnnnnnnnnnnnnnnnnnnnnnnnnnnnnnnnnnnnnnnnnnnnnnnnnnnnnnnnnnnnnnnnnnnnnnnnnnnnnnnnnnnnnnnnnnnnnnnnnnnnnnnnnnnnnnnnnnnnnnnnnnnnnnnnnnnnnnnnnnnnnnnnnnnnnnnnnnnnnnnnnnnnnnnnnnnnnnnnnnnnnnnnnnnnnnnnnnnnnnnnnnnnnnnnnnnnnnnnnnnnnnnnnnnnnnnnnnnnnnnnnnnnnnnnnnnnnnnnnnnnnnnnnnnnnnnnnnnnnnnnnnnnnnnnnnnnnnnnnnnnnnnnnnnnnnnnnnnnnnnnnnnnnnnnnnnnnnnnnnnnnnnnnnnnnnnnnnnnnnnnnnnnnnnnnnnnnnnnnnnnnnnnnnnnnnnnnnnnnnnnnnnnnnnnnnnnnnnnnnnnnnnnnnnnnnnnnnnnnnnnnnnnnnnnnnnnnnnnnnnnnnnnnnnnnnnnnnnnnnnnnnnnnnnnnnnnnnnnnnnnnnnnnnnnnnnnnnnnnnnnnnnnnnnnnnnnnnnnnnnnnnnnnnnnnnnnnnnnnnnnnnnnnnnnnnnnnnnnnnnnnnnnnnnnnnnnnnnnnnnnnnnnnnnnnnnnnnnnnnnnnnnnnnnnnnnnnnnnnnnnnnnnnnnnnnnnnnnnnnnnnnnnnnnnnnnnnnnnnnnnnnnnnnnnnnnnnnnnnnnnnnnnnnnnnnnnnnnnnnnnnnnnnnnnnnnnnnnnnnnnnnnnnnnnnnnnnnnnnnnnnnnnnnnnnnnnnnnnnnnnnnnnnnnnnnnnnnnnnnnnnnnnnnnnnnnnnnnnnnnnnnnnnnnnnnnnnnnnnnnnnnnnnnnnnnnnnnnnnnnnnnnnnnnnnnnnnnnnnnnnnnnnnnnnnnnnnnnnnnnnnnnnnnnnnnnnnnnnnnnnnnnnnnnnnnnnnnnnnnnnnnnnnnnnnnnnnnnnnnnnnnnnnnnnnnnnnnnnnnnnnnnnnnnnnnnnnnnnnnnnnnnnnnnnnnnnnnnnnnnnnnnnnnnnnnnnnnnnnnnnnnnnnnnnnnnnnnnnnnnnnnnnnnnnnnnnnnnnnnnnnnnnnnnnnnnnnnnnnnnnnnnnnnnnnnnnnnnnnnnnnnnnnnnnnnnnnnnnnnnnnnnnnnnnnnnnnnnnnnnnnnnnnnnnnnnnnnnnnnnnnnnnnnnnnnnnnnnnnnnnnnnnnnnnnnnnnnnnnnnnnnnnnnnnnnnnnnnnnnnnnnnnnnnnnnnnnnnnnnnnnnnnnnnnnnnnnnnnnnnnnnnnnnnnnnnnnnnnnnnnnnnnnnnnnnnnnnnnnnnnnnnnnnnnnnnnnnnnnnnnnnnnnnnnnnnnnnnnnnnnnnnnnnnnnnnnnnnnnnnnnnnnnnnnnnnnnnnnnnnnnnnnnnnnnnnnnnnnnnnnnnnnnnnnnnnnnnnnnnnnnnnnnnnnnnnnnnnnnnnnnnnnnnnnnnnnnnnnnnnnnnnnnnnnnnnnnnnnnnnnnnnnnnnnnnnnnnnnnnnnnnnnnnnnnnnnnnnnnnnnnnnnnnnnnnnnnnnnnnnnnnnnnnnnnnnnnnnnnnnnnnnnnnnnnnnnnnnnnnnnnnnnnnnnnnnnnnnnnnnnnnnnnnnnnnnnnnnnnnnnnnnnnnnnnnnnnnnnnnnnnnnnnnnnnnnnnnnnnnnnnnnnnnnnnnnnnnnnnnnnnnnnnnnnnnnnnnnnnnnnnnnnnnnnnnnnnnnnnnnnnnnnnnnnnnnnnnnnnnnnnnnnnnnnnnnnnnnnnnnnnnnnnnnnnnnnnnnnnnnnnnnnnnnnnnnnnnnnnnnnnnnnnnnnnnnnnnnnnnnnnnnnnnnnnnnnnnnnnnnnnnnnnnnnnnnnnnnnnnnnnnnnnnnnnnnnnnnnnnnnnnnnnnnnnnnnnnnnnnnnnnnnnnnnnnnnnnnnnnnnnnnnnnnnnnnnnnnnnnnnnnnnnnnnnnnnnnnnnnnnnnnnnnnnnnnnnnnnnnnnnnnnnnnnnnnnnnnnnnnnnnnnnnnnnnnnnnnnnnnnnnnnnnnnnnnnnnnnnnnnnnnnnnnnnnnnnnnnnnnnnnnnnnnnnnnnnnnnnnnnnnnnnnnnnnnnnnnnnnnnnnnnnnnnnnnnnnnnnnnnnnnnnnnnnnnnnnnnnnnnnnnnnnnnnnnnnnnnnnnnnnnnnnnnnnnnnnnnnnnnnnnnnnnnnnnnnnnnnnnnnnnnnnnnnnnnnnnnnnnnnnnnnnnnnnnnnnnnnnnnnnnnnnnnnnnnnnnnnnnnnnnnnnnnnnnnnnnnnnnnnnnnnnnnnnnnnnnnnnnnnnnnnnnnnnnnnnnnnnnnnnnnnnnnnnnnnnnnnnnnnnnnnnnnnnnnnnnnnnnnnnnnnnnnnnnnnnnnnnnnnnnnnnnnnnnnnnnnnnnnnnnnnnnnnnnnnnnnnnnnnnnnnnnnnnnnnnnnnnnnnnnnnnnnnnnnnnnnnnnnnnnnnnnnnnnnnnnnnnnnnnnnnnnnnnnnnnnnnnnnnnnnnnnnnnnnnnnnnnnnnnnnnnnnnnnnnnnnnnnnnnnnnnnnnnnnnnnnnnnnnnnnnnnnnnnnnnnnnnnnnnnnnnnnnnnnnnnnnnnnnnnnnnnnnnnnnnnnnnnnnnnnnnnnnnnnnnnnnnnnnnnnnnnnnnnnnnnnnnnnnnnnnnnnnnnnnnnnnnnnnnnnnnnnnnnnnnnnnnnnnnnnnnnnnnnnnnnnnnnnnnnnnnnnnnnnnnnnnnnnnnnnnnnnnnnnnnnnnnnnnnnnnnnnnnnnnnnnnnnnnnnnnnnnnnnnnnnnnnnnnnnnnnnnnnnnnnnnnnnnnnnnnnnnnnnnnnnnnnnnnnnnnnnnnnnnnnnnnnnnnnnnnnnnnnnnnnnnnnnnnnnnnnnnnnnnnnnnnnnnnnnnnnnnnnnnnnnnnnnnnnnnnnnnnnnnnnnnnnnnnnnnnnnnnnnnnnnnnnnnnnnnnnnnnnnnnnnnnnnnnnnnnnnnnnnnnnnnnnnnnnnnnnnnnnnnnnnnnnnnnnnnnnnnnnnnnnnnnnnnnnnnnnnnnnnnnnnnnnnnnnnnnnnnnnnnnnnnnnnnnnnnnnnnnnnnnnnnnnnnnnnnnnnnnnnnnnnnnnnnnnnnnnnnnnnnnnnnnnnnnnnnnnnnnnnnnnnnnnnnnnnnnnnnnnnnnnnnnnnnnnnnnnnnnnnnnnnnnnnnnnnnnnnnnnnnnnnnnnnnnnnnnnnnnnnnnnnnnnnnnnnnnnnnnnnnnnnnnnnnnnnnnnnnnnnnnnnnnnnnnnnnnnnnnnnnnnnnnnnnnnnnnnnnnnnnnnnnnnnnnnnnnnnnnnnnnnnnnnnnnnnnnnnnnnnnnnnnnnnnnnnnnnnnnnnnnnnnnnnnnnnnnnnnnnnnnnnnnnnnnnnnnnnnnnnnnnnnnnnnnnnnnnnnnnnnnnnnnnnnnnnnnnnnnnnnnnnnnnnnnnnnnnnnnnnnnnnnnnnnnnnnnnnnnnnnnnnnnnnnnnnnnnnnnnnnnnnnnnnnnnnnnnnnnnnnnnnnnnnnnnnnnnnnnnnnnnnnnnnnnnnnnnnnnnnnnnnnnnnnnnnnnnnnnnnnnnnnnnnnnnnnnnnnnnnnnnnnnnnnnnnnnnnnnnnnnnnnnnnnnnnnnnnnnnnnnnnnnnnnnnnnnnnnnnnnnnnnnnnnnnnnnnnnnnnnnnnnnnnnnnnnnnnnnnnnnnnnnnnnnnnnnnnnnnnnnnnnnnnnnnnnnnnnnnnnnnnnnnnnnnnnnnnnnnnnnnnnnnnnnnnnnnnnnnnnnnnnnnnnnnnnnnnnnnnnnnnnnnnnnnnnnnnnnnnnnnnnnnnnnnnnnnnnnnnnnnnnnnnnnnnnnnnnnnnnnnnnnnnnnnnnnnnnnnnnnnnnnnnnnnnnnnnnnnnnnnnnnnnnnnnnnnnnnnnnnnnnnnnnnnnnnnnnnnnnnnnnnnnnnnnnnnnnnnnnnnnnnnnnnnnnnnnnnnnnnnnnnnnnnnnnnnnnnnnnnnnnnnnnnnnnnnnnnnnnnnnnnnnnnnnnnnnnnnnnnnnnnnnnnnnnnnnnnnnnnnnnnnnnnnnnnnnnnnnnnnnnnnnnnnnnnnnnnnnnnnnnnnnnnnnnnnnnnnnnnnnnnnnnnnnnnnnnnnnnnnnnnnnnnnnnnnnnnnnnnnnnnnnnnnnnnnnnnnnnnnnnnnnnnnnnnnnnnnnnnnnnnnnnnnnnnnnnnnnnnnnnnnnnnnnnnnnnnnnnnnnnnnnnnnnnnnnnnnnnnnnnnnnnnnnnnnnnnnnnnnnnnnnnnnnnnnnnnnnnnnnnnnnnnnnnnnnnnnnnnnnnnnnnnnnnnnnnnnnnnnnnnnnnnnnnnnnnnnnnnnnnnnnnnnnnnnnnnnnnnnnnnnnnnnnnnnnnnnnnnnnnnnnnnnnnnnnnnnnnnnnnnnnnnnnnnnnnnnnnnnnnnnnnnnnnnnnnnnnnnnnnnnnnnnnnnnnnnnnnnnnnnnnnnnnnnnnnnnnnnnnnnnnnnnnnnnnnnnnnnnnnnnnnnnnnnnnnnnnnnnnnnnnnnnnnnnnnnnnnnnnnnnnnnnnnnnnnnnnnnnnnnnnnnnnnnnnnnnnnnnnnnnnnnnnnnnnnnnnnnnnnnnnnnnnnnnnnnnnnnnnnnnnnnnnnnnnnnnnnnnnnnnnnnnnnnnnnnnnnnnnnnnnnnnnnnnnnnnnnnnnnnnnnnnnnnnnnnnnnnnnnnnnnnnnnnnnnnnnnnnnnnnnnnnnnnnnnnnnnnnnnnnnnnnnnnnnnnnnnnnnnnnnnnnnnnnnnnnnnnnnnnnnnnnnnnnnnnnnnnnnnnnnnnnnnnnnnnnnnnnnnnnnnnnnnnnnnnnnnnnnnnnnnnnnnnnnnnnnnnnnnnnnnnnnnnnnnnnnnnnnnnnnnnnnnnnnnnnnnnnnnnnnnnnnnnnnnnnnnnnnnnnnnnnnnnnnnnnnnnnnnnnnnnnnnnnnnnnnnnnnnnnnnnnnnnnnnnnnnnnnnnnnnnnnnnnnnnnnnnnnnnnnnnnnnnnnnnnnnnnnnnnnnnnnnnnnnnnnnnnnnnnnnnnnnnnnnnnnnnnnnnnnnnnnnnnnnnnnnnnnnnnnnnnnnnnnnnnnnnnnnnnnnnnnnnnnnnnnnnnnnnnnnnnnnnnnnnnnnnnnnnnnnnnnnnnnnnnnnnnnnnnnnnnnnnnnnnnnnnnnnnnnnnnnnnnnnnnnnnnnnnnnnnnnnnnnnnnnnnnnnnnnnnnnnnnnnnnnnnnnnnnnnnnnnnnnnnnnnnnnnnnnnnnnnnnnnnnnnnnnnnnnnnnnnnnnnnnnnnnnnnnnnnnnnnnnnnnnnnnnnnnnnnnnnnnnnnnnnnnnnnnnnnnnnnnnnnnnnnnnnnnnnnnnnnnnnnnnnnnnnnnnnnnnnnnnnnnnnnnnnnnnnnnnnnnnnnnnnnnnnnnnnnnnnnnnnnnnnnnnnnnnnnnnnnnnnnnnnnnnnnnnnnnnnnnnnnnnnnnnnnnnnnnnnnnnnnnnnnnnnnnnnnnnnnnnnnnnnnnnnnnnnnnnnnnnnnnnnnnnnnnnnnnnnnnnnnnnnnnnnnnnnnnnnnnnnnnnnnnnnnnnnnnnnnnnnnnnnnnnnnnnnnnnnnnnnnnnnnnnnnnnnnnnnnnnnnnnnnnnnnnnnnnnnnnnnnnnnnnnnnnnnnnnnnnnnnnnnnnnnnnnnnnnnnnnnnnnnnnnnnnnnnnnnnnnnnnnnnnnnnnnnnnnnnnnnnnnnnnnnnnnnnnnnnnnnnnnnnnnnnnnnnnnnnnnnnnnnnnnnnnnnnnnnnnnnnnnnnnnnnnnnnnnnnnnnnnnnnnnnnnnnnnnnnnnnnnnnnnnnnnnnnnnnnnnnnnnnnnnnnnnnnnnnnnnnnnnnnnnnnnnnnnnnnnnnnnnnnnnnnnnnnnnnnnnnnnnnnnnnnnnnnnnnnnnnnnnnnnnnnnnnnnnnnnnnnnnnnnnnnnnnnnnnnnnnnnnnnnnnnnnnnnnnnnnnnnnnnnnnnnnnnnnnnnnnnnnnnnnnnnnnnnnnnnnnnnnnnnnnnnnnnnnnnnnnnnnnnnnnnnnnnnnnnnnnnnnnnnnnnnnnnnnnnnnnnnnnnnnnnnnnnnnnnnnnnnnnnnnnnnnnnnnnnnnnnnnnnnnnnnnnnnnnnnnnnnnnnnnnnnnnnnnnnnnnnnnnnnnnnnnnnnnnnnnnnnnnnnnnnnnnnnnnnnnnnnnnnnnnnnnnnnnnnnnnnnnnnnnnnnnnnnnnnnnnnnnnnnnnnnnnnnnnnnnnnnnnnnnnnnnnnnnnnnnnnnnnnnnnnnnnnnnnnnnnnnnnnnnnnnnnnnnnnnnnnnnnnnnnnnnnnnnnnnnnnnnnnnnnnnnnnnnnnnnnnnnnnnnnnnnnnnnnnnnnnnnnnnnnnnnnnnnnnnnnnnnnnnnnnnnnnnnnnnnnnnnnnnnnnnnnnnnnnnnnnnnnnnnnnnnnnnnnnnnnnnnnnnnnnnnnnnnnnnnnnnnnnnnnnnnnnnnnnnnnnnnnnnnnnnnnnnnnnnnnnnnnnnnnnnnnnnnnnnnnnnnnnnnnnnnnnnnnnnnnnnnnnnnnnnnnnnnnnnnnnnnnnnnnnnnnnnnnnnnnnnnnnnnnnnnnnnnnnnnnnnnnnnnnnnnnnnnnnnnnnnnnnnnnnnnnnnnnnnnnnnnnnnnnnnnnnnnnnnnnnnnnnnnnnnnnnnnnnnnnnnnnnnnnnnnnnnnnnnnnnnnnnnnnnnnnnnnnnnnnnnnnnnnnnnnnnnnnnnnnnnnnnnnnnnnnnnnnnnnnnnnnnnnnnnnnnnnnnnnnnnnnnnnnnnnnnnnnnnnnnnnnnnnnnnnnnnnnnnnnnnnnnnnnnnnnnnnnnnnnnnnnnnnnnnnnnnnnnnnnnnnnnnnnnnnnnnnnnnnnnnnnnnnnnnnnnnnnnnnnnnnnnnnnnnnnnnnnnnnnnnnnnnnnnnnnnnnnnnnnnnnnnnnnnnnnnnnnnnnnnnnnnnnnnnnnnnnnnnnnnnnnnnnnnnnnnnnnnnnnnnnnnnnnnnnnnnnnnnnnnnnnnnnnnnnnnnnnnnnnnnnnnnnnnnnnnnnnnnnnnnnnnnnnnnnnnnnnnnnnnnnnnnnnnnnnnnnnnnnnnnnnnnnnnnnnnnnnnnnnnnnnnnnnnnnnnnnnnnnnnnnnnnnnnnnnnnnnnnnnnnnnnnnnnnnnnnnnnnnnnnnnnnnnnnnnnnnnnnnnnnnnnnnnnnnnnnnnnnnnnnnnnnnnnnnnnnnnnnnnnnnnnnnnnnnnnnnnnnnnnnnnnnnnnnnnnnnnnnnnnnnnnnnnnnnnnnnnnnnnnnnnnnnnnnnnnnnnnnnnnnnnnnnnnnnnnnnnnnnnnnnnnnnnnnnnnnnnnnnnnnnnnnnnnnnnnnnnnnnnnnnnnnnnnnnnnnnnnnnnnnnnnnnnnnnnnnnnnnnnnnnnnnnnnnnnnnnnnnnnnnnnnnnnnnnnnnnnnnnnnnnnnnnnnnnnnnnnnnnnnnnnnnnnnnnnnnnnnnnnnnnnnnnnnnnnnnnnnnnnnnnnnnnnnnnnnnnnnnnnnnnnnnnnnnnnnnnnnnnnnnnnnnnnnnnnnnnnnnnnnnnnnnnnnnnnnnnnnnnnnnnnnnnnnnnnnnnnnnnnnnnnnnnnnnnnnnnnnnnnnnnnnnnnnnnnnnnnnnnnnnnnnnnnnnnnnnnnnnnnnnnnnnnnnnnnnnnnnnnnnnnnnnnnnnnnnnnnnnnnnnnnnnnnnnnnnnnnnnnnnnnnnnnnnnnnnnnnnnnnnnnnnnnnnnnnnnnnnnnnnnnnnnnnnnnnnnnnnnnnnnnnnnnnnnnnnnnnnnnnnnnnnnnnnnnnnnnnnnnnnnnnnnnnnnnnnnnnnnnnnnnnnnnnnnnnnnnnnnnnnnnnnnnnnnnnnnnnnnnnnnnnnnnnnnnnnnnnnnnnnnnnnnnnnnnnnnnnnnnnnnnnnnnnnnnnnnnnnnnnnnnnnnnnnnnnnnnnnnnnnnnnnnnnnnnnnnnnnnnnnnnnnnnnnnnnnnnnnnnnnnnnnnnnnnnnnnnnnnnnnnnnnnnnnnnnnnnnnnnnnnnnnnnnnnnnnnnnnnnnnnnnnnnnnnnnnnnnnnnnnnnnnnnnnnnnnnnnnnnnnnnnnnnnnnnnnnnnnnnnnnnnnnnnnnnnnnnnnnnnnnnnnnnnnnnnnnnnnnnnnnnnnnnnnnnnnnnnnnnnnnnnnnnnnnnnnnnnnnnnnnnnnnnnnnnnnnnnnnnnnnnnnnnnnnnnnnnnnnnnnnnnnnnnnnnnnnnnnnnnnnnnnnnnnnnnnnnnnnnnnnnnnnnnnnnnnnnnnnnnnnnnnnnnnnnnnnnnnnnnnnnnnnnnnnnnnnnnnnnnnnnnnnnnnnnnnnnnnnnnnnnnnnnnnnnnnnnnnnnnnnnnnnnnnnnnnnnnnnnnnnnnnnnnnnnnnnnnnnnnnnnnnnnnnnnnnnnnnnnnnnnnnnnnnnnnnnnnnnnnnnnnnnnnnnnnnnnnnnnnnnnnnnnnnnnnnnnnnnnnnnnnnnnnnnnnnnnnnnnnnnnnnnnnnnnnnnnnnnnnnnnnnnnnnnnnnnnnnnnnnnnnnnnnnnnnnnnnnnnnnnnnnnnnnnnnnnnnnnnnnnnnnnnnnnnnnnnnnnnnnnnnnnnnnnnnnnnnnnnnnnnnnnnnnnnnnnnnnnnnnnnnnnnnnnnnnnnnnnnnnnnnnnnnnnnnnnnnnnnnnnnnnnnnnnnnnnnnnnnnnnnnnnnnnnnnnnnnnnnnnnnnnnnnnnnnnnnnnnnnnnnnnnnnnnnnnnnnnnnnnnnnnnnnnnnnnnnnnnnnnnnnnnnnnnnnnnnnnnnnnnnnnnnnnnnnnnnnnnnnnnnnnnnnnnnnnnnnnnnnnnnnnnnnnnnnnnnnnnnnnnnnnnnnnnnnnnnnnnnnnnnnnnnnnnnnnnnnnnnnnnnnnnnnnnnnnnnnnnnnnnnnnnnnnnnnnnnnnnnnnnnnnnnnnnnnnnnnnnnnnnnnnnnnnnnnnnnnnnnnnnnnnnnnnnnnnnnnnnnnnnnnnnnnnnnnnnnnnnnnnnnnnnnnnnnnnnnnnnnnnnnnnnnnnnnnnnnnnnnnnnnnnnnnnnnnnnnnnnnnnnnnnnnnnnnnnnnnnnnnnnnnnnnnnnnnnnnnnnnnnnnnnnnnnnnnnnnnnnnnnnnnnnnnnnnnnnnnnnnnnnnnnnnnnnnnnnnnnnnnnnnnnnnnnnnnnnnnnnnnnnnnnnnnnnnnnnnnnnnnnnnnnnnnnnnnnnnnnnnnnnnnnnnnnnnnnnnnnnnnnnnnnnnnnnnnnnnnnnnnnnnnnnnnnnnnnnnnnnnnnnnnnnnnnnnnnnnnnnnnnnnnnnnnnnnnnnnnnnnnnnnnnnnnnnnnnnnnnnnnnnnnnnnnnnnnnnnnnnnnnnnnnnnnnnnnnnnnnnnnnnnnnnnnnnnnnnnnnnnnnnnnnnnnnnnnnnnnnnnnnnnnnnnnnnnnnnnnnnnnnnnnnnnnnnnnnnnnnnnnnnnnnnnnnnnnnnnnnnnnnnnnnnnnnnnnnnnnnnnnnnnnnnnnnnnnnnnnnnnnnnnnnnnnnnnnnnnnnnnnnnnnnnnnnnnnnnnnnnnnnnnnnnnnnnnnnnnnnnnnnnnnnnnnnnnnnnnnnnnnnnnnnnnnnnnnnnnnnnnnnnnnnnnnnnnnnnnnnnnnnnnnnnnnnnnnnnnnnnnnnnnnnnnnnnnnnnnnnnnnnnnnnnnnnnnnnnnnnnnnnnnnnnnnnnnnnnnnnnnnnnnnnnnnnnnnnnnnnnnnnnnnnnnnnnnnnnnnnnnnnnnnnnnnnnnnnnnnnnnnnnnnnnnnnnnnnnnnnnnnnnnnnnnnnnnnnnnnnnnnnnnnnnnnnnnnnnnnnnnnnnnnnnnnnnnnnnnnnnnnnnnnnnnnnnnnnnnnnnnnnnnnnnnnnnnnnnnnnnnnnnnnnnnnnnnnnnnnnnnnnnnnnnnnnnnnnnnnnnnnnnnnnnnnnnnnnnnnnnnnnnnnnnnnnnnnnnnnnnnnnnnnnnnnnnnnnnnnnnnnnnnnnnnnnnnnnnnnnnnnnnnnnnnnnnnnnnnnnnnnnnnnnnnnnnnnnnnnnnnnnnnnnnnnnnnnnnnnnnnnnnnnnnnnnnnnnnnnnnnnnnnnnnnnnnnnnnnnnnnnnnnnnnnnnnnnnnnnnnnnnnnnnnnnnnnnnnnnnnnnnnnnnnnnnnnnnnnnnnnnnnnnnnnnnnnnnnnnnnnnnnnnnnnnnnnnnnnnnnnnnnnnnnnnnnnnnnnnnnnnnnnnnnnnnnnnnnnnnnnnnnnnnnnnnnnnnnnnnnnnnnnnnnnnnnnnnnnnnnnnnnnnnnnnnnnnnnnnnnnnnnnnnnnnnnnnnnnnnnnnnnnnnnnnnnnnnnnnnnnnnnnnnnnnnnnnnnnnnnnnnnnnnnnnnnnnnnnnnnnnnnnnnnnnnnnnnnnnnnnnnnnnnnnnnnnnnnnnnnnnnnnnnnnnnnnnnnnnnnnnnnnnnnnnnnnnnnnnnnnnnnnnnnnnnnnnnnnnnnnnnnnnnnnnnnnnnnnnnnnnnnnnnnnnnnnnnnnnnnnnnnnnnnnnnnnnnnnnnnnnnnnnnnnnnnnnnnnnnnnnnnnnnnnnnnnnnnnnnnnnnnnnnnnnnnnnnnnnnnnnnnnnnnnnnnnnnnnnnnnnnnnnnnnnnnnnnnnnnnnnnnnnnnnnnnnnnnnnnnnnnnnnnnnnnnnnnnnnnnnnnnnnnnnnnnnnnnnnnnnnnnnnnnnnnnnnnnnnnnnnnnnnnnnnnnnnnnnnnnnnnnnnnnnnnnnnnnnnnnnnnnnnnnnnnnnnnnnnnnnnnnnnnnnnnnnnnnnnnnnnnnnnnnnnnnnnnnnnnnnnnnnnnnnnnnnnnnnnnnnnnnnnnnnnnnnnnnnnnnnnnnnnnnnnnnnnnnnnnnnnnnnnnnnnnnnnnnnnnnnnnnnnnnnnnnnnnnnnnnnnnnnnnnnnnnnnnnnnnnnnnnnnnnnnnnnnnnnnnnnnnnnnnnnnnnnnnnnnnnnnnnnnnnnnnnnnnnnnnnnnnnnnnnnnnnnnnnnnnnnnnnnnnnnnnnnnnnnnnnnnnnnnnnnnnnnnnnnnnnnnnnnnnnnnnnnnnnnnnnnnnnnnnnnnnnnnnnnnnnnnnnnnnnnnnnnnnnnnnnnnnnnnnnnnnnnnnnnnnnnnnnnnnnnnnnnnnnnnnnnnnnnnnnnnnnnnnnnnnnnnnnnnnnnnnnnnnnnnnnnnnnnnnnnnnnnnnnnnnnnnnnnnnnnnnnnnnnnnnnnnnnnnnnnnnnnnnnnnnnnnnnnnnnnnnnnnnnnnnnnnnnnnnnnnnnnnnnnnnnnnnnnnnnnnnnnnnnnnnnnnnnnnnnnnnnnnnnnnnnnnnnnnnnnnnnnnnnnnnnnnnnnnnnnnnnnnnnnnnnnnnnnnnnnnnnnnnnnnnnnnnnnnnnnnnnnnnnnnnnnnnnnnnnnnnnnnnnnnnnnnnnnnnnnnnnnnnnnnnnnnnnnnnnnnnnnnnnnnnnnnnnnnnnnnnnnnnnnnnnnnnnnnnnnnnnnnnnnnnnnnnnnnnnnnnnnnnnnnnnnnnnnnnnnnnnnnnnnnnnnnnnnnnnnnnnnnnnnnnnnnnnnnnnnnnnnnnnnnnnnnnnnnnnnnnnnnnnnnnnnnnnnnnnnnnnnnnnnnnnnnnnnnnnnnnnnnnnnnnnnnnnnnnnnnnnnnnnnnnnnnnnnnnnnnnnnnnnnnnnnnnnnnnnnnnnnnnnnnnnnnnnnnnnnnnnnnnnnnnnnnnnnnnnnnnnnnnnnnnnnnnnnnnnnnnnnnnnnnnnnnnnnnnnnnnnnnnnnnnnnnnnnnnnnnnnnnnnnnnnnnnnnnnnnnnnnnnnnnnnnnnnnnnnnnnnnnnnnnnnnnnnnnnnnnnnnnnnnnnnnnnnnnnnnnnnnnnnnnnnnnnnnnnnnnnnnnnnnnnnnnnnnnnnnnnnnnnnnnnnnnnnnnnnnnnnnnnnnnnnnnnnnnnnnnnnnnnnnnnnnnnnnnnnnnnnnnnnnnnnnnnnnnnnnnnnnnnnnnnnnnnnnnnnnnnnnnnnnnnnnnnnnnnnnnnnnnnnnnnnnnnnnnnnnnnnnnnnnnnnnnnnnnnnnnnnnnnnnnnnnnnnnnnnnnnnnnnnnnnnnnnnnnnnnnnnnnnnnnnnnnnnnnnnnnnnnnnnnnnnnnnnnnnnnnnnnnnnnnnnnnnnnnnnnnnnnnnnnnnnnnnnnnnnnnnnnnnnnnnnnnnnnnnnnnnnnnnnnnnnnnnnnnnnnnnnnnnnnnnnnnnnnnnnnnnnnnnnnnnnnnnnnnnnnnnnnnnnnnnnnnnnnnnnnnnnnnnnnnnnnnnnnnnnnnnnnnnnnnnnnnnnnnnnnnnnnnnnnnnnnnnnnnnnnnnnnnnnnnnnnnnnnnnnnnnnnnnnnnnnnnnnnnnnnnnnnnnnnnnnnnnnnnnnnnnnnnnnnnnnnnnnnnnnnnnnnnnnnnnnnnnnnnnnnnnnnnnnnnnnnnnnnnnnnnnnnnnnnnnnnnnnnnnnnnnnnnnnnnnnnnnnnnnnnnnnnnnnnnnnnnnnnnnnnnnnnnnnnnnnnnnnnnnnnnnnnnnnnnnnnnnnnnnnnnnnnnnnnnnnnnnnnnnnnnnnnnnnnnnnnnnnnnnnnnnnnnnnnnnnnnnnnnnnnnnnnnnnnnnnnnnnnnnnnnnnnnnnnnnnnnnnnnnnnnnnnnnnnnnnnnnnnnnnnnnnnnnnnnnnnnnnnnnnnnnnnnnnnnnnnnnnnnnnnnnnnnnnnnnnnnnnnnnnnnnnnnnnnnnnnnnnnnnnnnnnnnnnnnnnnnnnnnnnnnnnnnnnnnnnnnnnnnnnnnnnnnnnnnnnnnnnnnnnnnnnnnnnnnnnnnnnnnnnnnnnnnnnnnnnnnnnnnnnnnnnnnnnnnnnnnnnnnnnnnnnnnnnnnnnnnnnnnnnnnnnnnnnnnnnnnnnnnnnnnnnnnnnnnnnnnnnnnnnnnnnnnnnnnnnnnnnnnnnnnnnnnnnnnnnnnnnnnnnnnnnnnnnnnnnnnnnnnnnnnnnnnnnnnnnnnnnnnnnnnnnnnnnnnnnnnnnnnnnnnnnnnnnnnnnnnnnnnnnnnnnnnnnnnnnnnnnnnnnnnnnnnnnnnnnnnnnnnnnnnnnnnnnnnnnnnnnnnnnnnnnnnnnnnnnnnnnnnnnnnnnnnnnnnnnnnnnnnnnnnnnnnnnnnnnnnnnnnnnnnnnnnnnnnnnnnnnnnnnnnnnnnnnnnnnnnnnnnnnnnnnnnnnnnnnnnnnnnnnnnnnnnnnnnnnnnnnnnnnnnnnnnnnnnnnnnnnnnnnnnnnnnnnnnnnnnnnnnnnnnnnnnnnnnnnnnnnnnnnnnnnnnnnnnnnnnnnnnnnnnnnnnnnnnnnnnnnnnnnnnnnnnnnnnnnnnnnnnnnnnnnnnnnnnnnnnnnnnnnnnnnnnnnnnnnnnnnnnnnnnnnnnnnnnnnnnnnnnnnnnnnnnnnnnnnnnnnnnnnnnnnnnnnnnnnnnnnnnnnnnnnnnnnnnnnnnnnnnnnnnnnnnnnnnnnnnnnnnnnnnnnnnnnnnnnnnnnnnnnnnnnnnnnnnnnnnnnnnnnnnnnnnnnnnnnnnnnnnnnnnnnnnnnnnnnnnnnnnnnnnnnnnnnnnnnnnnnnnnnnnnnnnnnnnnnnnnnnnnnnnnnnnnnnnnnnnnnnnnnnnnnnnnnnnnnnnnnnnnnnnnnnnnnnnnnnnnnnnnnnnnnnnnnnnnnnnnnnnnnnnnnnnnnnnnnnnnnnnnnnnnnnnnnnnnnnnnnnnnnnnnnnnnnnnnnnnnnnnnnnnnnnnnnnnnnnnnnnnnnnnnnnnnnnnnnnnnnnnnnnnnnnnnnnnnnnnnnnnnnnnnnnnnnnnnnnnnnnnnnnnnnnnnnnnnnnnnnnnnnnnnnnnnnnnnnnnnnnnnnnnnnnnnnnnnnnnnnnnnnnnnnnnnnnnnnnnnnnnnnnnnnnnnnnnnnnnnnnnnnnnnnnnnnnnnnnnnnnnnnnnnnnnnnnnnnnnnnnnnnnnnnnnnnnnnnnnnnnnnnnnnnnnnnnnnnnnnnnnnnnnnnnnnnnnnnnnnnnnnnnnnnnnnnnnnnnnnnnnnnnnnnnnnnnnnnnnnnnnnnnnnnnnnnnnnnnnnnnnnnnnnnnnnnnnnnnnnnnnnnnnnnnnnnnnnnnnnnnnnnnnnnnnnnnnnnnnnnnnnnnnnnnnnnnnnnnnnnnnnnnnnnnnnnnnnnnnnnnnnnnnnnnnnnnnnnnnnnnnnnnnnnnnnnnnnnnnnnnnnnnnnnnnnnnnnnnnnnnnnnnnnnnnnnnnnnnnnnnnnnnnnnnnnnnnnnnnnnnnnnnnnnnnnnnnnnnnnnnnnnnnnnnnnnnnnnnnnnnnnnnnnnnnnnnnnnnnnnnnnnnnnnnnnnnnnnnnnnnnnnnnnnnnnnnnnnnnnnnnnnnnnnnnnnnnnnnnnnnnnnnnnnnnnnnnnnnnnnnnnnnnnnnnnnnnnnnnnnnnnnnnnnnnnnnnnnnnnnnnnnnnnnnnnnnnnnnnnnnnnnnnnnnnnnnnnnnnnnnnnnnnnnnnnnnnnnnnnnnnnnnnnnnnnnnnnnnnnnnnnnnnnnnnnnnnnnnnnnnnnnnnnnnnnnnnnnnnnnnnnnnnnnnnnnnnnnnnnnnnnnnnnnnnnnnnnnnnnnnnnnnnnnnnnnnnnnnnnnnnnnnnnnnnnnnnnnnnnnnnnnnnnnnnnnnnnnnnnnnnnnnnnnnnnnnnnnnnnnnnnnnnnnnnnnnnnnnnnnnnnnnnnnnnnnnnnnnnnnnnnnnnnnnnnnnnnnnnnnnnnnnnnnnnnnnnnnnnnnnnnnnnnnnnnnnnnnnnnnnnnnnnnnnnnnnnnnnnnnnnnnnnnnnnnnnnnnnnnnnnnnnnnnnnnnnnnnnnnnnnnnnnnnnnnnnnnnnnnnnnnnnnnnnnnnnnnnnnnnnnnnnnnnnnnnnnnnnnnnnnnnnnnnnnnnnnnnnnnnnnnnnnnnnnnnnnnnnnnnnnnnnnnnnnnnnnnnnnnnnnnnnnnnnnnnnnnnnnnnnnnnnnnnnnnnnnnnnnnnnnnnnnnnnnnnnnnnnnnnnnnnnnnnnnnnnnnnnnnnnnnnnnnnnnnnnnnnnnnnnnnnnnnnnnnnnnnnnnnnnnnnnnnnnnnnnnnnnnnnnnnnnnnnnnnnnnnnnnnnnnnnnnnnnnnnnnnnnnnnnnnnnnnnnnnnnnnnnnnnnnnnnnnnnnnnnnnnnnnnnnnnnnnnnnnnnnnnnnnnnnnnnnnnnnnnnnnnnnnnnnnnnnnnnnnnnnnnnnnnnnnnnnnnnnnnnnnnnnnnnnnnnnnnnnnnnnnnnnnnnnnnnnnnnnnnnnnnnnnnnnnnnnnnnnnnnnnnnnnnnnnnnnnnnnnnnnnnnnnnnnnnnnnnnnnnnnnnnnnnnnnnnnnnnnnnnnnnnnnnnnnnnnnnnnnnnnnnnnnnnnnnnnnnnnnnnnnnnnnnnnnnnnnnnnnnnnnnnnnnnnnnnnnnnnnnnnnnnnnnnnnnnnnnnnnnnnnnnnnnnnnnnnnnnnnnnnnnnnnnnnnnnnnnnnnnnnnnnnnnnnnnnnnnnnnnnnnnnnnnnnnnnnnnnnnnnnnnnnnnnnnnnnnnnnnnnnnnnnnnnnnnnnnnnnnnnnnnnnnnnnnnnnnnnnnnnnnnnnnnnnnnnnnnnnnnnnnnnnnnnnnnnnnnnnnnnnnnnnnnnnnnnnnnnnnnnnnnnnnnnnnnnnnnnnnnnnnnnnnnnnnnnnnnnnnnnnnnnnnnnnnnnnnnnnnnnnnnnnnnnnnnnnnnnnnnnnnnnnnnnnnnnnnnnnnnnnnnnnnnnnnnnnnnnnnnnnnnnnnnnnnnnnnnnnnnnnnnnnnnnnnnnnnnnnnnnnnnnnnnnnnnnnnnnnnnnnnnnnnnnnnnnnnnnnnnnnnnnnnnnnnnnnnnnnnnnnnnnnnnnnnnnnnnnnnnnnnnnnnnnnnnnnnnnnnnnnnnnnnnnnnnnnnnnnnnnnnnnnnnnnnnnnnnnnnnnnnnnnnnnnnnnnnnnnnnnnnnnnnnnnnnnnnnnnnnnnnnnnnnnnnnnnnnnnnnnnnnnnnnnnnnnnnnnnnnnnnnnnnnnnnnnnnnnnnnnnnnnnnnnnnnnnnnnnnnnnnnnnnnnnnnnnnnnnnnnnnnnnnnnnnnnnnnnnnnnnnnnnnnnnnnnnnnnnnnnnnnnnnnnnnnnnnnnnnnnnnnnnnnnnnnnnnnnnnnnnnnnnnnnnnnnnnnnnnnnnnnnnnnnnnnnnnnnnnnnnnnnnnnnnnnnnnnnnnnnnnnnnnnnnnnnnnnnnnnnnnnnnnnnnnnnnnnnnnnnnnnnnnnnnnnnnnnnnnnnnnnnnnnnnnnnnnnnnnnnnnnnnnnnnnnnnnnnnnnnnnnnnnnnnnnnnnnnnnnnnnnnnnnnnnnnnnnnnnnnnnnnnnnnnnnnnnnnnnnnnnnnnnnnnnnnnnnnnnnnnnnnnnnnnnnnnnnnnnnnnnnnnnnnnnnnnnnnnnnnnnnnnnnnnnnnnnnnnnnnnnnnnnnnnnnnnnnnnnnnnnnnnnnnnnnnnnnnnnnnnnnnnnnnnnnnnnnnnnnnnnnnnnnnnnnnnnnnnnnnnnnnnnnnnnnnnnnnnnnnnnnnnnnnnnnnnnnnnnnnnnnnnnnnnnnnnnnnnnnnnnnnnnnnnnnnnnnnnnnnnnnnnnnnnnnnnnnnnnnnnnnnnnnnnnnnnnnnnnnnnnnnnnnnnnnnnnnnnnnnnnnnnnnnnnnnnnnnnnnnnnnnnnnnnnnnnnnnnnnnnnnnnnnnnnnnnnnnnnnnnnnnnnnnnnnnnnnnnnnnnnnnnnnnnnnnnnnnnnnnnnnnnnnnnnnnnnnnnnnnnnnnnnnnnnnnnnnnnnnnnnnnnnnnnnnnnnnnnnnnnnnnnnnnnnnnnnnnnnnnnnnnnnnnnnnnnnnnnnnnnnnnnnnnnnnnnnnnnnnnnnnnnnnnnnnnnnnnnnnnnnnnnnnnnnnnnnnnnnnnnnnnnnnnnnnnnnnnnnnnnnnnnnnnnnnnnnnnnnnnnnnnnnnnnnnnnnnnnnnnnnnnnnnnnnnnnnnnnnnnnnnnnnnnnnnnnnnnnnnnnnnnnnnnnnnnnnnnnnnnnnnnnnnnnnnnnnnnnnnnnnnnnnnnnnnnnnnnnnnnnnnnnnnnnnnnnnnnnnnnnnnnnnnnnnnnnnnnnnnnnnnnnnnnnnnnnnnnnnnnnnnnnnnnnnnnnnnnnnnnnnnnnnnnnnnnnnnnnnnnnnnnnnnnnnnnnnnnnnnnnnnnnnnnnnnnnnnnnnnnnnnnnnnnnnnnnnnnnnnnnnnnnnnnnnnnnnnnnnnnnnnnnnnnnnnnnnnnnnnnnnnnnnnnnnnnnnnnnnnnnnnnnnnnnnnnnnnnnnnnnnnnnnnnnnnnnnnnnnnnnnnnnnnnnnnnnnnnnnnnnnnnnnnnnnnnnnnnnnnnnnnnnnnnnnnnnnnnnnnnnnnnnnnnnnnnnnnnnnnnnnnnnnnnnnnnnnnnnnnnnnnnnnnnnnnnnnnnnnnnnnnnnnnnnnnnnnnnnnnnnnnnnnnnnnnnnnnnnnnnnnnnnnnnnnnnnnnnnnnnnnnnnnnnnnnnnnnnnnnnnnnnnnnnnnnnnnnnnnnnnnnnnnnnnnnnnnnnnnnnnnnnnnnnnnnnnnnnnnnnnnnnnnnnnnnnnnnnnnnnnnnnnnnnnnnnnnnnnnnnnnnnnnnnnnnnnnnnnnnnnnnnnnnnnnnnnnnnnnnnnnnnnnnnnnnnnnnnnnnnnnnnnnnnnnnnnnnnnnnnnnnnnnnnnnnnnnnnnnnnnnnnnnnnnnnnnnnnnnnnnnnnnnnnnnnnnnnnnnnnnnnnnnnnnnnnnnnnnnnnnnnnnnnnnnnnnnnnnnnnnnnnnnnnnnnnnnnnnnnnnnnnnnnnnnnnnnnnnnnnnnnnnnnnnnnnnnnnnnnnnnnnnnnnnnnnnnnnnnnnnnnnnnnnnnnnnnnnnnnnnnnnnnnnnnnnnnnnnnnnnnnnnnnnnnnnnnnnnnnnnnnnnnnnnnnnnnnnnnnnnnnnnnnnnnnnnnnnnnnnnnnnnnnnnnnnnnnnnnnnnnnnnnnnnnnnnnnnnnnnnnnnnnnnnnnnnnnnnnnnnnnnnnnnnnnnnnnnnnnnnnnnnnnnnnnnnnnnnnnnnnnnnnnnnnnnnnnnnnnnnnnnnnnnnnnnnnnnnnnnnnnnnnnnnnnnnnnnnnnnnnnnnnnnnnnnnnnnnnnnnnnnnnnnnnnnnnnnnnnnnnnnnnnnnnnnnnnnnnnnnnnnnnnnnnnnnnnnnnnnnnnnnnnnnnnnnnnnnnnnnnnnnnnnnnnnnnnnnnnnnnnnnnnnnnnnnnnnnnnnnnnnnnnnnnnnnnnnnnnnnnnnnnnnnnnnnnnnnnnnnnnnnnnnnnnnnnnnnnnnnnnnnnnnnnnnnnnnnnnnnnnnnnnnnnnnnnnnnnnnnnnnnnnnnnnnnnnnnnnnnnnnnnnnnnnnnnnnnnnnnnnnnnnnnnnnnnnnnnnnnnnnnnnnnnnnnnnnnnnnnnnnnnnnnnnnnnnnnnnnnnnnnnnnnnnnnnnnnnnnnnnnnnnnnnnnnnnnnnnnnnnnnnnnnnnnnnnnnnnnnnnnnnnnnnnnnnnnnnnnnnnnnnnnnnnnnnnnnnnnnnnnnnnnnnnnnnnnnnnnnnnnnnnnnnnnnnnnnnnnnnnnnnnnnnnnnnnnnnnnnnnnnnnnnnnnnnnnnnnnnnnnnnnnnnnnnnnnnnnnnnnnnnnnnnnnnnnnnnnnnnnnnnnnnnnnnnnnnnnnnnnnnnnnnnnnnnnnnnnnnnnnnnnnnnnnnnnnnnnnnnnnnnnnnnnnnnnnnnnnnnnnnnnnnnnnnnnnnnnnnnnnnnnnnnnnnnnnnnnnnnnnnnnnnnnnnnnnnnnnnnnnnnnnnnnnnnnnnnnnnnnnnnnnnnnnnnnnnnnnnnnnnnnnnnnnnnnnnnnnnnnnnnnnnnnnnnnnnnnnnnnnnnnnnnnnnnnnnnnnnnnnnnnnnnnnnnnnnnnnnnnnnnnnnnnnnnnnnnnnnnnnnnnnnnnnnnnnnnnnnnnnnnnnnnnnnnnnnnnnnnnnnnnnnnnnnnnnnnnnnnnnnnnnnnnnnnnnnnnnnnnnnnnnnnnnnnnnnnnnnnnnnnnnnnnnnnnnnnnnnnnnnnnnnnnnnnnnnnnnnnnnnnnnnnnnnnnnnnnnnnnnnnnnnnnnnnnnnnnnnnnnnnnnnnnnnnnnnnnnnnnnnnnnnnnnnnnnnnnnnnnnnnnnnnnnnnnnnnnnnnnnnnnnnnnnnnnnnnnnnnnnnnnnnnnnnnnnnnnnnnnnnnnnnnnnnnnnnnnnnnnnnnnnnnnnnnnnnnnnnnnnnnnnnnnnnnnnnnnnnnnnnnnnnnnnnnnnnnnnnnnnnnnnnnnnnnnnnnnnnnnnnnnnnnnnnnnnnnnnnnnnnnnnnnnnnnnnnnnnnnnnnnnnnnnnnnnnnnnnnnnnnnnnnnnnnnnnnnnnnnnnnnnnnnnnnnnnnnnnnnnnnnnnnnnnnnnnnnnnnnnnnnnnnnnnnnnnnnnnnnnnnnnnnnnnnnnnnnnnnnnnnnnnnnnnnnnnnnnnnnnnnnnnnnnnnnnnnnnnnnnnnnnnnnnnnnnnnnnnnnnnnnnnnnnnnnnnnnnnnnnnnnnnnnnnnnnnnnnnnnnnnnnnnnnnnnnnnnnnnnnnnnnnnnnnnnnnnnnnnnnnnnnnnnnnnnnnnnnnnnnnnnnnnnnnnnnnnnnnnnnnnnnnnnnnnnnnnnnnnnnnnnnnnnnnnnnnnnnnnnnnnnnnnnnnnnnnnnnnnnnnnnnnnnnnnnnnnnnnnnnnnnnnnnnnnnnnnnnnnnnnnnnnnnnnnnnnnnnnnnnnnnnnnnnnnnnnnnnnnnnnnnnnnnnnnnnnnnnnnnnnnnnnnnnnnnnnnnnnnnnnnnnnnnnnnnnnnnnnnnnnnnnnnnnnnnnnnnnnnnnnnnnnnnnnnnnnnnnnnnnnnnnnnnnnnnnnnnnnnnnnnnnnnnnnnnnnnnnnnnnnnnnnnnnnnnnnnnnnnnnnnnnnnnnnnnnnnnnnnnnnnnnnnnnnnnnnnnnnnnnnnnnnnnnnnnnnnnnnnnnnnnnnnnnnnnnnnnnnnnnnnnnnnnnnnnnnnnnnnnnnnnnnnnnnnnnnnnnnnnnnnnnnnnnnnnnnnnnnnnnnnnnnnnnnnnnnnnnnnnnnnnnnnnnnnnnnnnnnnnnnnnnnnnnnnnnnnnnnnnnnnnnnnnnnnnnnnnnnnnnnnnnnnnnnnnnnnnnnnnnnnnnnnnnnnnnnnnnnnnnnnnnnnnnnnnnnnnnnnnnnnnnnnnnnnnnnnnnnnnnnnnnnnnnnnnnnnnnnnnnnnnnnnnnnnnnnnnnnnnnnnnnnnnnnnnnnnnnnnnnnnnnnnnnnnnnnnnnnnnnnnnnnnnnnnnnnnnnnnnnnnnnnnnnnnnnnnnnnnnnnnnnnnnnnnnnnnnnnnnnnnnnnnnnnnnnnnnnnnnnnnnnnnnnnnnnnnnnnnnnnnnnnnnnnnnnnnnnnnnnnnnnnnnnnnnnnnnnnnnnnnnnnnnnnnnnnnnnnnnnnnnnnnnnnnnnnnnnnnnnnnnnnnnnnnnnnnnnnnnnnnnnnnnnnnnnnnnnnnnnnnnnnnnnnnnnnnnnnnnnnnnnnnnnnnnnnnnnnnnnnnnnnnnnnnnnnnnnnnnnnnnnnnnnnnnnnnnnnnnnnnnnnnnnnnnnnnnnnnnnnnnnnnnnnnnnnnnnnnnnnnnnnnnnnnnnnnnnnnnnnnnnnnnnnnnnnnnnnnnnnnnnnnnnnnnnnnnnnnnnnnnnnnnnnnnnnnnnnnnnnnnnnnnnnnnnnnnnnnnnnnnnnnnnnnnnnnnnnnnnnnnnnnnnnnnnnnnnnnnnnnnnnnnnnnnnnnnnnnnnnnnnnnnnnnnnnnnnnnnnnnnnnnnnnnnnnnnnnnnnnnnnnnnnnnnnnnnnnnnnnnnnnnnnnnnnnnnnnnnnnnnnnnnnnnnnnnnnnnnnnnnnnnnnnnnnnnnnnnnnnnnnnnnnnnnnnnnnnnnnnnnnnnnnnnnnnnnnnnnnnnnnnnnnnnnnnnnnnnnnnnnnnnnnnnnnnnnnnnnnnnnnnnnnnnnnnnnnnnnnnnnnnnnnnnnnnnnnnnnnnnnnnnnnnnnnnnnnnnnnnnnnnnnnnnnnnnnnnnnnnnnnnnnnnnnnnnnnnnnnnnnnnnnnnnnnnnnnnnnnnnnnnnnnnnnnnnnnnnnnnnnnnnnnnnnnnnnnnnnnnnnnnnnnnnnnnnnnnnnnnnnnnnnnnnnnnnnnnnnnnnnnnnnnnnnnnnnnnnnnnnnnnnnnnnnnnnnnnnnnnnnnnnnnnnnnnnnnnnnnnnnnnnnnnnnnnnnnnnnnnnnnnnnnnnnnnnnnnnnnnnnnnnnnnnnnnnnnnnnnnnnnnnnnnnnnnnnnnnnnnnnnnnnnnnnnnnnnnnnnnnnnnnnnnnnnnnnnnnnnnnnnnnnnnnnnnnnnnnnnnnnnnnnnnnnnnnnnnnnnnnnnnnnnnnnnnnnnnnnnnnnnnnnnnnnnnnnnnnnnnnnnnnnnnnnnnnnnnnnnnnnnnnnnnnnnnnnnnnnnnnnnnnnnnnnnnnnnnnnnnnnnnnnnnnnnnnnnnnnnnnnnnnnnnnnnnnnnnnnnnnnnnnnnnnnnnnnnnnnnnnnnnnnnnnnnnnnnnnnnnnnnnnnnnnnnnnnnnnnnnnnnnnnnnnnnnnnnnnnnnnnnnnnnnnnnnnnnnnnnnnnnnnnnnnnnnnnnnnnnnnnnnnnnnnnnnnnnnnnnnnnnnnnnnnnnnnnnnnnnnnnnnnnnnnnnnnnnnnnnnnnnnnnnnnnnnnnnnnnnnnnnnnnnnnnnnnnnnnnnnnnnnnnnnnnnnnnnnnnnnnnnnnnnnnnnnnnnnnnnnnnnnnnnnnnnnnnnnnnnnnnnnnnnnnnnnnnnnnnnnnnnnnnnnnnnnnnnnnnnnnnnnnnnnnnnnnnnnnnnnnnnnnnnnnnnnnnnnnnnnnnnnnnnnnnnnnnnnnnnnnnnnnnnnnnnnnnnnnnnnnnnnnnnnnnnnnnnnnnnnnnnnnnnnnnnnnnnnnnnnnnnnnnnnnnnnnnnnnnnnnnnnnnnnnnnnnnnnnnnnnnnnnnnnnnnnnnnnnnnnnnnnnnnnnnnnnnnnnnnnnnnnnnnnnnnnnnnnnnnnnnnnnnnnnnnnnnnnnnnnnnnnnnnnnnnnnnnnnnnnnnnnnnnnnnnnnnnnnnnnnnnnnnnnnnnnnnnnnnnnnnnnnnnnnnnnnnnnnnnnnnnnnnnnnnnnnnnnnnnnnnnnnnnnnnnnnnnnnnnnnnnnnnnnnnnnnnnnnnnnnnnnnnnnnnnnnnnnnnnnnnnnnnnnnnnnnnnnnnnnnnnnnnnnnnnnnnnnnnnnnnnnnnnnnnnnnnnnnnnnnnnnnnnnnnnnnnnnnnnnnnnnnnnnnnnnnnnnnnnnnnnnnnnnnnnnnnnnnnnnnnnnnnnnnnnnnnnnnnnnnnnnnnnnnnnnnnnnnnnnnnnnnnnnnnnnnnnnnnnnnnnnnnnnnnnnnnnnnnnnnnnnnnnnnnnnnnnnnnnnnnnnnnnnnnnnnnnnnnnnnnnnnnnnnnnnnnnnnnnnnnnnnnnnnnnnnnnnnnnnnnnnnnnnnnnnnnnnnnnnnnnnnnnnnnnnnnnnnnnnnnnnnnnnnnnnnnnnnnnnnnnnnnnnnnnnnnnnnnnnnnnnnnnnnnnnnnnnnnnnnnnnnnnnnnnnnnnnnnnnnnnnnnnnnnnnnnnnnnnnnnnnnnnnnnnnnnnnnnnnnnnnnnnnnnnnnnnnnnnnnnnnnnnnnnnnnnnnnnnnnnnnnnnnnnnnnnnnnnnnnnnnnnnnnnnnnnnnnnnnnnnnnnnnnnnnnnnnnnnnnnnnnnnnnnnnnnnnnnnnnnnnnnnnnnnnnnnnnnnnnnnnnnnnnnnnnnnnnnnnnnnnnnnnnnnnnnnnnnnnnnnnnnnnnnnnnnnnnnnnnnnnnnnnnnnnnnnnnnnnnnnnnnnnnnnnnnnnnnnnnnnnnnnnnnnnnnnnnnnnnnnnnnnnnnnnnnnnnnnnnnnnnnnnnnnnnnnnnnnnnnnnnnnnnnnnnnnnnnnnnnnnnnnnnnnnnnnnnnnnnnnnnnnnnnnnnnnnnnnnnnnnnnnnnnnnnnnnnnnnnnnnnnnnnnnnnnnnnnnnnnnnnnnnnnnnnnnnnnnnnnnnnnnnnnnnnnnnnnnnnnnnnnnnnnnnnnnnnnnnnnnnnnnnnnnnnnnnnnnnnnnnnnnnnnnnnnnnnnnnnnnnnnnnnnnnnnnnnnnnnnnnnnnnnnnnnnnnnnnnnnnnnnnnnnnnnnnnnnnnnnnnnnnnnnnnnnnnnnnnnnnnnnnnnnnnnnnnnnnnnnnnnnnnnnnnnnnnnnnnnnnnnnnnnnnnnnnnnnnnnnnnnnnnnnnnnnnnnnnnnnnnnnnnnnnnnnnnnnnnnnnnnnnnnnnnnnnnnnnnnnnnnnnnnnnnnnnnnnnnnnnnnnnnnnnnnnnnnnnnnnnnnnnnnnnnnnnnnnnnnnnnnnnnnnnnnnnnnnnnnnnnnnnnnnnnnnnnnnnnnnnnnnnnnnnnnnnnnnnnnnnnnnnnnnnnnnnnnnnnnnnnnnnnnnnnnnnnnnnnnnnnnnnnnnnnnnnnnnnnnnnnnnnnnnnnnnnnnnnnnnnnnnnnnnnnnnnnnnnnnnnnnnnnnnnnnnnnnnnnnnnnnnnnnnnnnnnnnnnnnnnnnnnnnnnnnnnnnnnnnnnnnnnnnnnnnnnnnnnnnnnnnnnnnnnnnnnnnnnnnnnnnnnnnnnnnnnnnnnnnnnnnnnnnnnnnnnnnnnnnnnnnnnnnnnnnnnnnnnnnnnnnnnnnnnnnnnnnnnnnnnnnnnnnnnnnnnnnnnnnnnnnnnnnnnnnnnnnnnnnnnnnnnnnnnnnnnnnnnnnnnnnnnnnnnnnnnnnnnnnnnnnnnnnnnnnnnnnnnnnnnnnnnnnnnnnnnnnnnnnnnnnnnnnnnnnnnnnnnnnnnnnnnnnnnnnnnnnnnnnnnnnnnnnnnnnnnnnnnnnnnnnnnnnnnnnnnnnnnnnnnnnnnnnnnnnnnnnnnnnnnnnnnnnnnnnnnnnnnnnnnnnnnnnnnnnnnnnnnnnnnnnnnnnnnnnnnnnnnnnnnnnnnnnnnnnnnnnnnnnnnnnnnnnnnnnnnnnnnnnnnnnnnnnnnnnnnnnnnnnnnnnnnnnnnnnnnnnnnnnnnnnnnnnnnnnnnnnnnnnnnnnnnnnnnnnnnnnnnnnnnnnnnnnnnnnnnnnnnnnnnnnnnnnnnnnnnnnnnnnnnnnnnnnnnnnnnnnnnnnnnnnnnnnnnnnnnnnnnnnnnnnnnnnnnnnnnnnnnnnnnnnnnnnnnnnnnnnnnnnnnnnnnnnnnnnnnnnnnnnnnnnnnnnnnnnnnnnnnnnnnnnnnnnnnnnnnnnnnnnnnnnnnnnnnnnnnnnnnnnnnnnnnnnnnnnnnnnnnnnnnnnnnnnnnnnnnnnnnnnnnnnnnnnnnnnnnnnnnnnnnnnnnnnnnnnnnnnnnnnnnnnnnnnnnnnnnnnnnnnnnnnnnnnnnnnnnnnnnnnnnnnnnnnnnnnnnnnnnnnnnnnnnnnnnnnnnnnnnnnnnnnnnnnnnnnnnnnnnnnnnnnnnnnnnnnnnnnnnnnnnnnnnnnnnnnnnnnnnnnnnnnnnnnnnnnnnnnnnnnnnnnnnnnnnnnnnnnnnnnnnnnnnnnnnnnnnnnnnnnnnnnnnnnnnnnnnnnnnnnnnnnnnnnnnnnnnnnnnnnnnnnnnnnnnnnnnnnnnnnnnnnnnnnnnnnnnnnnnnnnnnnnnnnnnnnnnnnnnnnnnnnnnnnnnnnnnnnnnnnnnnnnnnnnnnnnnnnnnnnnnnnnnnnnnnnnnnnnnnnnnnnnnnnnnnnnnnnnnnnnnnnnnnnnnnnnnnnnnnnnnnnnnnnnnnnnnnnnnnnnnnnnnnnnnnnnnnnnnnnnnnnnnnnnnnnnnnnnnnnnnnnnnnnnnnnnnnnnnnnnnnnnnnnnnnnnnnnnnnnnnnnnnnnnnnnnnnnnnnnnnnnnnnnnnnnnnnnnnnnnnnnnnnnnnnnnnnnnnnnnnnnnnnnnnnnnnnnnnnnnnnnnnnnnnnnnnnnnnnnnnnnnnnnnnnnnnnnnnnnnnnnnnnnnnnnnnnnnnnnnnnnnnnnnnnnnnnnnnnnnnnnnnnnnnnnnnnnnnnnnnnnnnnnnnnnnnnnnnnnnnnnnnnnnnnnnnnnnnnnnnnnnnnnnnnnnnnnnnnnnnnnnnnnnnnnnnnnnnnnnnnnnnnnnnnnnnnnnnnnnnnnnnnnnnnnnnnnnnnnnnnnnnnnnnnnnnnnnnnnnnnnnnnnnnnnnnnnnnnnnnnnnnnnnnnnnnnnnnnnnnnnnnnnnnnnnnnnnnnnnnnnnnnnnnnnnnnnnnnnnnnnnnnnnnnnnnnnnnnnnnnnnnnnnnnnnnnnnnnnnnnnnnnnnnnnnnnnnnnnnnnnnnnnnnnnnnnnnnnnnnnnnnnnnnnnnnnnnnnnnnnnnnnnnnnnnnnnnnnnnnnnnnnnnnnnnnnnnnnnnnnnnnnnnnnnnnnnnnnnnnnnnnnnnnnnnnnnnnnnnnnnnnnnnnnnnnnnnnnnnnnnnnnnnnnnnnnnnnnnnnnnnnnnnnnnnnnnnnnnnnnnnnnnnnnnnnnnnnnnnnnnnnnnnnnnnnnnnnnnnnnnnnnnnnnnnnnnnnnnnnnnnnnnnnnnnnnnnnnnnnnnnnnnnnnnnnnnnnnnnnnnnnnnnnnnnnnnnnnnnnnnnnnnnnnnnnnnnnnnnnnnnnnnnnnnnnnnnnnnnnnnnnnnnnnnnnnnnnnnnnnnnnnnnnnnnnnnnnnnnnnnnnnnnnnnnnnnnnnnnnnnnnnnnnnnnnnnnnnnnnnnnnnnnnnnnnnnnnnnnnnnnnnnnnnnnnnnnnnnnnnnnnnnnnnnnnnnnnnnnnnnnnnnnnnnnnnnnnnnnnnnnnnnnnnnnnnnnnnnnnnnnnnnnnnnnnnnnnnnnnnnnnnnnnnnnnnnnnnnnnnnnnnnnnnnnnnnnnnnnnnnnnnnnnnnnnnnnnnnnnnnnnnnnnnnnnnnnnnnnnnnnnnnnnnnnnnnnnnnnnnnnnnnnnnnnnnnnnnnnnnnnnnnnnnnnnnnnnnnnnnnnnnnnnnnnnnnnnnnnnnnnnnnnnnnnnnnnnnnnnnnnnnnnnnnnnnnnnnnnnnnnnnnnnnnnnnnnnnnnnnnnnnnnnnnnnnnnnnnnnnnnnnnnnnnnnnnnnnnnnnnnnnnnnnnnnnnnnnnnnnnnnnnnnnnnnnnnnnnnnnnnnnnnnnnnnnnnnnnnnnnnnnnnnnnnnnnnnnnnnnnnnnnnnnnnnnnnnnnnnnnnnnnnnnnnnnnnnnnnnnnnnnnnnnnnnnnnnnnnnnnnnnnnnnnnnnnnnnnnnnnnnnnnnnnnnnnnnnnnnnnnnnnnnnnnnnnnnnnnnnnnnnnnnnnnnnnnnnnnnnnnnnnnnnnnnnnnnnnnnnnnnnnnnnnnnnnnnnnnnnnnnnnnnnnnnnnnnnnnnnnnnnnnnnnnnnnnnnnnnnnnnnnnnnnnnnnnnnnnnnnnnnnnnnnnnnnnnnnnnnnnnnnnnnnnnnnnnnnnnnnnnnnnnnnnnnnnnnnnnnnnnnnnnnnnnnnnnnnnnnnnnnnnnnnnnnnnnnnnnnnnnnnnnnnnnnnnnnnnnnnnnnnnnnnnnnnnnnnnnnnnnnnnnnnnnnnnnnnnnnnnnnnnnnnnnnnnnnnnnnnnnnnnnnnnnnnnnnnnnnnnnnnnnnnnnnnnnnnnnnnnnnnnnnnnnnnnnnnnnnnnnnnnnnnnnnnnnnnnnnnnnnnnnnnnnnnnnnnnnnnnnnnnnnnnnnnnnnnnnnnnnnnnnnnnnnnnnnnnnnnnnnnnnnnnnnnnnnnnnnnnnnnnnnnnnnnnnnnnnnnnnnnnnnnnnnnnnnnnnnnnnnnnnnnnnnnnnnnnnnnnnnnnnnnnnnnnnnnnnnnnnnnnnnnnnnnnnnnnnnnnnnnnnnnnnnnnnnnnnnnnnnnnnnnnnnnnnnnnnnnnnnnnnnnnnnnnnnnnnnnnnnnnnnnnnnnnnnnnnnnnnnnnnnnnnnnnnnnnnnnnnnnnnnnnnnnnnnnnnnnnnnnnnnnnnnnnnnnnnnnnnnnnnnnnnnnnnnnnnnnnnnnnnnnnnnnnnnnnnnnnnnnnnnnnnnnnnnnnnnnnnnnnnnnnnnnnnnnnnnnnnnnnnnnnnnnnnnnnnnnnnnnnnnnnnnnnnnnnnnnnnnnnnnnnnnnnnnnnnnnnnnnnnnnnnnnnnnnnnnnnnnnnnnnnnnnnnnnnnnnnnnnnnnnnnnnnnnnnnnnnnnnnnnnnnnnnnnnnnnnnnnnnnnnnnnnnnnnnnnnnnnnnnnnnnnnnnnnnnnnnnnnnnnnnnnnnnnnnnnnnnnnnnnnnnnnnnnnnnnnnnnnnnnnnnnnnnnnnnnnnnnnnnnnnnnnnnnnnnnnnnnnnnnnnnnnnnnnnnnnnnnnnnnnnnnnnnnnnnnnnnnnnnnnnnnnnnnnnnnnnnnnnnnnnnnnnnnnnnnnnnnnnnnnnnnnnnnnnnnnnnnnnnnnnnnnnnnnnnnnnnnnnnnnnnnnnnnnnnnnnnnnnnnnnnnnnnnnnnnnnnnnnnnnnnnnnnnnnnnnnnnnnnnnnnnnnnnnnnnnnnnnnnnnnnnnnnnnnnnnnnnnnnnnnnnnnnnnnnnnnnnnnnnnnnnnnnnnnnnnnnnnnnnnnnnnnnnnnnnnnnnnnnnnnnnnnnnnnnnnnnnnnnnnnnnnnnnnnnnnnnnnnnnnnnnnnnnnnnnnnnnnnnnnnnnnnnnnnnnnnnnnnnnnnnnnnnnnnnnnnnnnnnnnnnnnnnnnnnnnnnnnnnnnnnnnnnnnnnnnnnnnnnnnnnnnnnnnnnnnnnnnnnnnnnnnnnnnnnnnnnnnnnnnnnnnnnnnnnnnnnnnnnnnnnnnnnnnnnnnnnnnnnnnnnnnnnnnnnnnnnnnnnnnnnnnnnnnnnnnnnnnnnnnnnnnnnnnnnnnnnnnnnnnnnnnnnnnnnnnnnnnnnnnnnnnnnnnnnnnnnnnnnnnnnnnnnnnnnnnnnnnnnnnnnnnnnnnnnnnnnnnnnnnnnnnnnnnnnnnnnnnnnnnnnnnnnnnnnnnnnnnnnnnnnnnnnnnnnnnnnnnnnnnnnnnnnnnnnnnnnnnnnnnnnnnnnnnnnnnnnnnnnnnnnnnnnnnnnnnnnnnnnnnnnnnnnnnnnnnnnnnnnnnnnnnnnnnnnnnnnnnnnnnnnnnnnnnnnnnnnnnnnnnnnnnnnnnnnnnnnnnnnnnnnnnnnnnnnnnnnnnnnnnnnnnnnnnnnnnnnnnnnnnnnnnnnnnnnnnnnnnnnnnnnnnnnnnnnnnnnnnnnnnnnnnnnnnnnnnnnnnnnnnnnnnnnnnnnnnnnnnnnnnnnnnnnnnnnnnnnnnnnnnnnnnnnnnnnnnnnnnnnnnnnnnnnnnnnnnnnnnnnnnnnnnnnnnnnnnnnnnnnnnnnnnnnnnnnnnnnnnnnnnnnnnnnnnnnnnnnnnnnnnnnnnnnnnnnnnnnnnnnnnnnnnnnnnnnnnnnnnnnnnnnnnnnnnnnnnnnnnnnnnnnnnnnnnnnnnnnnnnnnnnnnnnnnnnnnnnnnnnnnnnnnnnnnnnnnnnnnnnnnnnnnnnnnnnnnnnnnnnnnnnnnnnnnnnnnnnnnnnnnnnnnnnnnnnnnnnnnnnnnnnnnnnnnnnnnnnnnnnnnnnnnnnnnnnnnnnnnnnnnnnnnnnnnnnnnnnnnnnnnnnnnnnnnnnnnnnnnnnnnnnnnnnnnnnnnnnnnnnnnnnnnnnnnnnnnnnnnnnnnnnnnnnnnnnnnnnnnnnnnnnnnnnnnnnnnnnnnnnnnnnnnnnnnnnnnnnnnnnnnnnnnnnnnnnnnnnnnnnnnnnnnnnnnnnnnnnnnnnnnnnnnnnnnnnnnnnnnnnnnnnnnnnnnnnnnnnnnnnnnnnnnnnnnnnnnnnnnnnnnnnnnnnnnnnnnnnnnnnnnnnnnnnnnnnnnnnnnnnnnnnnnnnnnnnnnnnnnnnnnnnnnnnnnnnnnnnnnnnnnnnnnnnnnnnnnnnnnnnnnnnnnnnnnnnnnnnnnnnnnnnnnnnnnnnnnnnnnnnnnnnnnnnnnnnnnnnnnnnnnnnnnnnnnnnnnnnnnnnnnnnnnnnnnnnnnnnnnnnnnnnnnnnnnnnnnnnnnnnnnnnnnnnnnnnnnnnnnnnnnnnnnnnnnnnnnnnnnnnnnnnnnnnnnnnnnnnnnnnnnnnnnnnnnnnnnnnnnnnnnnnnnnnnnnnnnnnnnnnnnnnnnnnnnnnnnnnnnnnnnnnnnnnnnnnnnnnnnnnnnnnnnnnnnnnnnnnnnnnnnnnnnnnnnntaaatttaaagcgattctaggcttataactaatagaaaaacggtggtaaggtaaatgtatatatagtagaaaaatctcaatcaattctctaactctttaaaaataataatagtccagaaaatataacaatctaatagataacttagtaatcaaataaataaaacaaaatgaaaggatgtttttcgggcagaaaaccagcctagtcagtcacatgacccaactgtatcagggatgaaaaatgacagtattcatcctagattctgatagaaactaatagctacttctctaaagaaacagtatataaggataatatataggttataggttatataattaaaggaggctatataggtagtatatacagctcctacctagtccctagtcccctacgtaccttaatagatataatacctcaggtatcagccttcttagtactagggtcctaacaataggccgggctgggtcaggttaaaacaggctttagagaagtctagttataagcgagtaggcatatgaaagaggaagcgaaaaacatatagaaagtaagaagtatatgaagaagagagaaaatcaggatatagagcgaaaacgcgatatatacccgttatagacgaattcccactggctcgttttgtagggcggtatatactatatatgaaggcggtatacaggtagggctttagggggtgttgaaacttatgaacagtcactgtacggtttggatttaacggatatatggagatctcgaaacctaagtattatttatacgagtgatctcgccggcttacggccatcgagatagtcgttgccgagcaaagcgactgattctaacttctaatgctgcgcaaagcccccctcttactggcttattggtttcacagcgacccctcggctagagcaactcccctgcttttatcataattctaggagaaaacctggccacgtgaaatgtacgtaagaccttctgatttatacttgcttcgcttcaggagcatcccggagaattgaacaacggtaggcgggccgttcagtgtacgaatagggaatggacgcgttcatagagaggctgccccgtgtggctgataaatgataatgcaagttacaagagcggctctgcgatcgcgtgtcggtgtatgatgacatcactctatttatggataacgaaacagtttaggcgcctagcgcaggcagccattcaactacaacatatgactcaactttagacctcgggaaagaacatagatgagtcagatccaagttaccctataaatggaagtactcaagaaaggaagttatactttatgaaaagcgagcgcaaaagcaagaacagtatagcatgtaagaggcaagagggcaagaaggcaagaaagcaagaaatcaaagataaggatctacaccaatagatcacatggtacagggggggtcaacgctcgaaaatgattggctgacccctcctgcggctgatcctattaggtgattgcccgcatgggatgttgtcacatgtgaccggacttaggcaggaaaatcaggtcacattaaatccgaaagttaccgtaaccttacacaggctactagtagagattgggcatatctacaaaaccatgctggtaaatagatatcaacatcgagtaccggagaccaaccaaaaataccatggtatggtatcacccgagtacccaaatgatgagatcagctggtccttgccaaatgacgcccaagcacaatctttcccctccctcagatccccttttgcgctctgatgccctcccaactaaaccattttacagtgagtccattggtctcatgagtccctcccctggagaaactcggaatctccgttaagcgccaccccgcagtttatcatcacaccctcagccccatcccaactgactcacagttcgctttcaatattcccttcaacctgccctcccttttcttcttcctttcccccttacccttctcattttccatttggtccattctcgctcgatggactattaccctattcatcaaattgactcattcggccattggagccttaaccccgagacttaggtcatattggcttatcgccacctgagagagacaaagaggcagaccctgacaaatcacctgttttgcctggtgattcaacttccattgagttccataaacactcgctcatcagctttcgccatccatcttctcactctgcctggtgtattcatcccctcccctcctctttccagaaaacctagccctggacaccattgacacaccattgactactttaacctcttattaccaattaccgttggctcaacggtatttaatctggaatgacttcgtccgctggctggaaaccagccgaccagccgaccactatgcatcgtctcccatccgtttctagccttatgtcacccccagagaccaagcctctcgagagctttcctgtctcgctttcaccgtttgcaaagcctcgagattcttcaacccgtgacatacagcttccacccatctcagatgatcgaaaacggacccagtcagagatggacctcccgtcgccacctgtgactccgtacaccgggaacaagaagagcaatcccaacgcctcggaccagattgaaagggatttgggatcccccagggaccctgtccttttcccccctcaggattccggtactgacgttgctacggatgagccactgttcggccccgttcaccctccatctgcagaggcacttgtggaagagcacatgaattctcatatggcaatctttcgcaataagttgaacaaacccacacgggatgaatatctccttgcgctttcctgtgtccctattgtttcgactcagtacaatcgcaacccgggtgcttgggcccgagaggaacgcgagacgttggagcgccaaatggccatgatgaaccgttatcgatcaggagattacgagcccaagttgaagaagattgctcctgctccggtgaaaagactaggaacccaaccgcgcgtgcagcgaactcgggtcaaacgcacccctaaatccacacccaagcagcaggtgtttgataactttgaacccccccaaaccccgcttaccaaaccgcgtaccttgggtacgaatcgcgatgacaccgattatcactcactcaaggactactcgcccccggcagagacgctaggcagtaatgccaaagcattgaaggctgattggaaggggcagatgttagatttgagcaatgacccggacagaaatattctcagtcccgccgagctcaatctcgcatctaccctgagactttcatgtgcgacctatctatgcagcaaacgtcgaatttttgaagctcgagttcgagctctcggtgtgggcaaagagttccgtaagacggatgcccagcaggcttgcaagatcgatgtcaataaagccagcaaactttggaccgcctacgaacgcgtgggttggtttagagctgaatattttcataaatacctagcatgatattgcaggttacgtgtcttgatggtactgtggataattctgccagttcatcacagcccgtgtgtcgcctcccatcacaggctaggcactaactgaccttctacctcaagtgtctatcactggcagtacagccctcgactattaatccatatttgagtgctctcggctatctacacctgaccaagacaaacacccaagtgttccctagaatcaacccaccttatctcttggcctgtcgatttccttttcaattgctatctcgcttttacgactcatcatgacacattcttttcttttgagattccccccttgttggttttcttttcgttttgcatacaggccccatggctttgattatttccaactttggctgctggcgtttgggtgcttcacttcagtttcgctttggtctagaatggcaggcttggttacccacgggtgttttcttttcactattgcgattgaattttactgcttggtcgtttccttttctttcttcctttttcctcgtctttgttttggaaaggcagcaatagcacataggataaggcttgataccctgaccggatatggttttcctatattacaatgaattgatatgaaattgagcttaagatacaattcacaaaaaagatacatactagttaatatatctatcatctgtagttgacatgcccaattgatatgtttctaatttaaaccgaaataaagcggtggggcgcaatcgtaatcctccggcagcccggcgccaccttttttttgacgtatcccttgtatcatcttttgcttcactccaatctggatcatcaatttccctctttgaaataaccttagtcaaaagtaatgtctcagcaagtgactcgttctgggtccatcgaggaacaggaacgcgcaagggaggagggcgacaagaagccaaagtctcgccgaccagccagtaggtcctgggatctcatcaaccctctgtccacaactaactgtaccagatactgctttccgccagcaaagattgaaagcgtggcagtgagcttgagatttccgtatatctgcctatggagcaccatgctaacatctcactaggccaatcttaacccctaaaagcgttctacctctgtttttcatcgttggcattatctttgccccgattggcggtgttcttctctgggcaagctctctagtatgcttcgttttatacctttgcgtccttggcagaacagctctgacgagctacgtgctctaggtccaagaaatttccatcgattactccgagtgctccagcaaagcaccgaccgacagctatgcctccgttcctcattattccgcgaccttcaaatcttctacagcaatatcggcacccacctggcgaaagtccatcaatgagtcttcgggcaccgttacttgcactcttctttttgagatcccgaacgagcttccagcaccagttttcatgtattaccgcctcactaacttctatcaaaaccaccgccgatatgttcagtcgctcgatttgaatcagcttatcggagatgctgtctcctacaatacggtcaagggtggcgtatgtgacccattagcggtcaacaccacggctcagaaggtatactatccatgtggactgattgcgaactcattcttcaacgacactattgggaagccccaaatcctaaacccgaatgcacctgagaatgataaacaattctatgaaatgaccactaagggcattgcgtgggcgagtgataaggaactcatcaaaccgacaaagtacagtatggatgatgtactgccaccaccaaattggctttgggccagcgagaacggtgtctataaagaggatcccaacttacatgaaaatgaagctttcatggtttggatgaggaccgctggcttgccatcgttcagcaagctttcccgccgtaacgatacccatggcatgcctgctgcaagatattccattgacattgttgatcgtatgtgttaatactgccgcttacccatatcttactaaaattttcaggtttcaatgtcaccgaatacgatggaaccaagtcgatcttgatctccactcgaacagtgcttgggggcaagaaccccttcatgggaatcgcctatgtggttgttggtggaatctgcgttgttctcggggctttgtttactctcgcacatttggtgcgtccgaggtatgatctcctttctttgtgggcagaaactccaaactcctaacctacttactagaaaacttggcgaccacacctatcttacttgggactcaaatcagccgagcactgctatcgccacgggacgggataatgccccttgaaccccatcttcctgctctttgttcggcgttttttttttttttttttctgtttctgtttcaatatgccctgtaaataacccctgtgtttaatgacctcatcctcaactttctgacataccaatcgtttcattttcttgaatcctacgtgctcctagcccttgctcaagacatgcattcctcgcgagacacagcattcctgatgggatctggcaggctatatggtacccgcgaaccggtcggtcttgagattgatggttctttttttgactctttatccactccttctgtttttctcttttggaacaggtgtaaaaggggagttcaaaaccagggtttcttaacatcatggtgtgtcactcatttttccaactcgtcatcttcatcaccgttttcctgcaggcttggtgtagcccctttgcactccagaaaagaggcgcctgtgctaccgaagaccccggtgcaaatttcttgcatgaagtaaggcgcctccaatcggatgaagccgatcttgctatttcgcaggccaggaaggccccgatcgagatcgagacctggttccatatcatcagcagcaagtcggagtccacccaggtcactgataatatgatcaattctcaagtcagttgcttcttttctcgactggcatctcagtgctaattatttacctacagttttctattctacaacaatcttatgcagattctggcatctcctaccgattgcaaggtgtgactcgtaatgtcaatgataagtgggcgagcaatgcggatgatacggccatgaaaacgactctccgaaagggaagctaccgaacattgaacgtttacttccaaaccgatctgcaggcctcacccgaacaagcgggacgtgctttcgggcacaggggtgcagtcaccaacaatgatctggcatcaagcgttcttggattctgcactttgcccgatccgagtgtcaatgctagtagcccggcttctcaatatatcaaggatggctgcaatgttttggccaaaacaatgcctggtggctccttggatctgtacaatcgaggcgggactgccatccacgagattggacactggaatggccttttgcacaccttccagggggaatcttgctcagtagataatcctggtgaccacataagtgacacgccacagcagtccaccccgacagatgggtgccctgaccagaaggattcttgtccagactcccctggattggacgcggtccacgacttcatggattattcatccgatgtatgttatgagcgcttcacgcccggacaaggagagcgcatgcggagtatgtggatatccatgcgtgaaggtaaatagcgcaacagtgacgggcaataaggccaatacaagctctgtatggagtccattcgcagccatacatgtacacgcagaagccagccggccaggctagttggttacgattcagagaaataatacctgtctaatgagctgttggacgaatttcatgtatgaatatttggctacagtacagttgagaggcgttaagagactagtttcctcccaattaacaccataaatgtgtcttattctgatcccatccaccgtgggcccgagtcaaatcgtacaagtattcgaaaggcaatcaagagatgcaaggcattcgtagcccaacttggcttgcccatagattggaacatggagtacaagaaagggagggaagaaaaagtcattttgatgccccagcggcaaaaaaatggtcgattaccgcttgcgcttgatcccgcggtcattgtcttcatggtcggcctccttgtctttacgtttcgccttttcctcaagggcgtcccagtcctcaccactttcctcgtcgccactgaagtcttcttcgctggcatcggcactcgcgtcgtcatcaaattcgctgtcttcctcagaactctcgtccccagctgcaagctctgaatctgacaactcgaaagccgactcctcttcctcgtctgacccgttctcagagtctgattcggccgataagaaagaccatccaccatcggcaaagaagccgtatggatcgctgacaactgttttcataatcgtggtccaattcaggttgagcggaccctcggtgaacgcaatatcaacagaatcaagccagtccttaacaccctcaagtgcctcaacaggaatcgtgttgatatgaacgggagtccggcggaaatccttaaagacgaagaccatgtcgaagtttttgagtccaaactgcacagattagtaaaccaggctgatgaaatagtagaagtggtaatcattacctgaactctctccagatgggctatttcgatttcattcaatgtgacggtcgtgaaaggaggttcagtgagctgaactagggcatctgtggtgggttgaatcaagacattagaccggtttggaacgccggtaaagccaatttccctgaatgggatatcgacatcgacgccctcgtccttgccagcgtccgcaaccttctcggcaaaggccttgaactcgcggtccaatgcagctctccgccgtctttcctcctgttcagcctcaaattcttcctcatctccgtagcgatgtttgcgccgacggtttccagtttcatcaaattgcatttccgtggcctcgcgatagaattgaatatcctttgtcttccgctttccaatcatgatgggcgtcttgagatgcacatggataagaacgatcaattcatgggcacatggttggaagaacagatgcttcacattgctgaagagcacatcgacatgctcattgcggaaaggcgataggtaccggagaccattctgatgaatttcgacttctcccggaacacgcttcccatccaaaggaggccggagatagacgtcagggagtttcactggacgtcggtttctaatttcaaccagtttatcctgctcaacaacatcctccaattccttcttctcctgctctcgtctcagggccgtcttgcgaagttcggtgatatcctgggcaactcgtgcaagccggtcgttatccttggatcggagggtgagattgcgaacaaaatgagctgataggtcctcaaagggctggtcatcctttcggcccacaccctgacctggagacaggaagttgattcgtaggtaggcgtattccccttcgtcgcttttgctggcgttctttatggtgttgatatggaagggaactggtcggcccatgataggcacaatcacggttgaagtcttcaggtcgacgtaaactgtaaggtctttgaccttggcggggagttggttgtctcgcttgtaagactcaaagcgcttgaatttcttctgtgccaccccattatcgtctcccgtagtaccggtgaaccgatccaaaccttcctttgtcttcttcaaagccagctctttttggtgttcacgacgacgggcttcagctccctcattgacctgagttggtctttcagcacgaagtttggttcttgtgacgtttctgccagcagttgcgctagatttcgtctcctttttctctttaacaggcttctctggctcttcctcatccccgaagtagaatgagatcgagtccatgtcaataccggcgtctttggtaaaaatatgaggcccattttcgccgacacgaaccgtatcggtgatgaccatggaatatgcaccattcttggcattcttggagtctggatccttaacatcagtaagcccgatcgtgatagacagtgtcatgccgttcttcaagacgcggttgttcttggcattgaggaccatattagcatcccgcagctcgattccaatccctgcgccaacgttcttaacaaagtgtccctccagctccggcttcttagaccggacgagactcagtgctttgttgtaaacgtccttggcgaccacaccatctcgaacctctttcatggttgcttcatggaggctaagcagtagggcatagttcgcttcttgtgattttgttgggtcaaccagatatgtgcgcccaataagcgaactgtaggtcttgtatctgattccaaagctggacaaaatgataccgggctcgaggtttttattgtcgggagtcgctgtgagcttgagatcgtaggcacctccactttgaattacaggtccgtaggcccagtcaatttgctgggaatcgaattccgagggcagccgcgccagcttgttgaaaaatttcccatcatcaatctttgcatcaacctttgcggcgagggctttatgtgtcatcttcttttcctcgtcgagcaaacgtgacatctcatcgacgaagtactctgacataaggccactacaagctctggaagcattgcggattgagaccttttttgagactgtgtcagcaagcaccacccgtgaaacgcactgacatagaaaaactaaccaattcatcagaatctttgatcgcaaaagcagctgagagtgcaggtgctatgtcaacttcctccacctctttcgatatttctgcgaatgtgcgcttccattcatctgcgaagggtcctgaagctgtatttttgggtaaggtgccgactttattctgtagttattgcggttagagtaaggcaaatcgaaccggtgatttaaatgtcattttagctcacccctgcgcccttgataacatccaagcatttctcaaatgctttggtctttgattctgggtctttggtagtgaccagaatctcgacgggaatctttccttcttttagcggctcaaggtgtttcgcttaaatttgatttaattagctatgtggcgcgcagaagtccatgtgttgataatcacctttcttggctgtggtgaccacgtaaatcgcctcagttgtgagaacaaatagtgtcgcagggaattcatacccgagaagccagaactaatcacgagttcataagtaacgatgttatgaagctcacgggccactgtgggacacggatagaaattttggaggtgattcacatacatgcatcgcgttgttcttctggaatgagttctcctcatcagtcttacccatcagaatgactatggaccctgcattgccaaatagggcattgcccgagcgcttgtcggccttccatgacgcatagaaactagacaggcggttgaaaaagttgttattgtcaatggcaatctcctcggccatggtgatggtctgatgtgagcaagatatgccacagtcagagactaagttgatggcaagagagcttggtggagaagcgcaggagctgttgtaggtatgtccgagtgctgaatttgttgaggatgaaggagagggaattaaggtagcatcaatgcgaccactgcgatgatgatagaccagacaccaatagaactaggttgtggaagaaaagacaaagacagaaagggacggcttaggggaaagtgaacgcgaaaagcgcgttcctgcactctaggtctctctatattaccgtatcaaagtattaccactttcatactagcgctgttttcatgtctctcgaatccgaacatgttttatgaatatctcttctcactgactttctttctatcttcaactttcaagttaacatggcgtatgtgagccttcacttggtcgtctaattagataacaaacaccctgtgatgctgccctcttttcccgcccacatcgcctgcgctttggaattcactatcgacattgagccagtctctctttgacaagcacccttttctacgatgtacactggctttttagttgtctgtaaacaatgaactctccgatagctcccatcctcctcgagcctcacctcggcgaacttcctggaagttcgcggagggtttttcgcaacgcagcnnnnnnnnnnnnnnnnnnnnnnnnnnnnnnnnnnnnnnnnnncatcctcctcgagcctcccctcggcgaacttcctggaagttcgcgaaggatttctcgcaacgatgcagctaccggagcatctgccgccggcgttcgcgctctcagtgcacagatggtggccttttacttcagagcaccgatcaaagctttctttcgtatgcgtgttgagtatgtagtatctatggacctgaagatctttgtattgacaatatttcacctagttatatggtaagaaacacgaccaacccatcaccagccttggttgcttatcatttgaaataggcatttgcgagagctgtgaacccacgtgtcgccgaaggcaaatggtctctgcatacgacaaccccgggattattgctccacgccgttcggacatatggctggcggtttatcccgaaccaagtgcttccaccattgatggcaaatgcagggtgacatataccagaggatatggccccaggtgattcaaaaacgctaacgatatagatcagggttggtgccgttctctacacgtcctatctccaagttttgggggccctacatgaacctgtgtcccaaggggtgaagcgagtatggcccccggctcctccatctgcaacattcgcagctggattcatagccggcacaattcagtcgattgtagccgcccctctggatgccttacaagttcgctttcaaaccaatgacatgctggagggtcagtaccggagtatgtggcattatggtcaccataagctcaaacagattggtctccgtggggtctttgcgggctggagcctgtcgttcatgcgggattcactcggctatgctgtgttcttctccacgttcgaatacatcaagtcacagtcctactattcattcgtcacttggtactatggctccctgcaagtcgatcatgtgggcatgctttcatcgtccaggtctagtgatcgtggtgtgccactcatcaagccccactatgcattggagccatgtttcctgctgatggccggtgttgtggcatcggtcgctcagcaaaccattcagcatcctataagtaggattcaagaccttcaccttggtcgtctggaatatctggatcaccaggccagcttcataccctcgcgacagaagatgatacaattctactaccatgcctatcaagagaccttcaagaggtgcgagcggaaggttgcgcgggccgggggctggcgctcctggttgttccgtggatttgtcgggagctctcttcgccaagtacctagcactagtgctggcctgatcatttttgaattggtgcgccgacggtacgcgaatcccgcagacgctgtccatattcagagtgatggatatgatatccttctcacttaatggcttatatgacaggtttttttccccctcgcgtcttttctgtttgttgtttgaacttttttatccttggtcattccgaagagggcgttacagacatagaatatgatttcattagacgtatatacatttatgtacatacaagcgataccctacttcataaatatcttcctggtaataagtagttaacgtaattcacatacgagccgccaccacatacgacccgccaccccatccaaaaacgcgtccatgaattagcacctagttaattcaaccacccaccatgccaccaaaacgctctcaatcctctaaagattcaatagagaaagagggtaggatcttattagctatccaggcttttaagaatcaagaattttccaatatttctactaccgcccgcacttttaacgtaccgcgttcaacccttcgggaccgcctcagtggtatacaacaccgcgcgacaataatacgcgacttctcgcgccaacttgactaaattaaccgcaattgaagaggaatctcttcgaaaatggataatctctatggattcttgtggatcggccccccggccctctatagtacgagaaatggcagatcttcttcttaaataacgcggaactaccccagttattttagttagctaaaattaggttatatattttattaaacggtaccctacccttatatcccgattcttaagacgttataattataagtgcgcgaaatgtaaagacctaaggattattagagagtggtttaatctagtttaaaaaactattctttagtatagaatcgatctagataatatttataactttaacgagacaggttttactataggattaactataatagcaaaagttataactagaagtaaatactacagttagagattacttttataacctagaaatcgcgagtaggtaactataattaaatgtataaatgcggtagggtaggcgcttcctctatatatgatttttaaaggcaaagtctttattaaatcttagttnnnnnnnnnnnnnnnnnnnnnnnnnnnnnnnnnnnnnnnnnnnnnnnnnnnnnnnnnnnnnnnnnnnnnnnnnnnnnnnnnnnnnnnnnnnnnnnnnnnnnnnnnnnnnnnnnnnnnnnnnnnnnnnnnnnnnnnnnnnnnnnnnnnnnnnnnnnnnnnnnnnnnnnnnnnnnntatattaataaactcgactttcttaaagtataccctactatataaattaaagcttttaaatcggagataattaaaaatagcttcttagcagctggtttagtaccctttttacctaatcgggtactttcgaagctaaatatctagcttcgaatacctaccccccctctgagccagggtagtgacttaagccggaattttatactaaaaacccctgctaccaggaaagatctatatcgataggctttgtcaatcaatgctttactttgtatataatctcgaagcctaataagtccttctaaacgtgcattaaaccaacttatcaaaggctgccaagttataatgtataatactattctactagcgaaagaaaataaggagttacaggatgaaaatgagaagaagaagtaaaaacggacccgatctagaaggcagatacccgccgaagaaggcctctctgttcaagaagcatctgtattaattatacagtaacaagaagcaattgaagcacctccccccagccccggcatgcctagagaatcgactattcaaccatgtacgcgcccctcccgggggtgtggaatatgcagattgccagggcatagaagagaaacatgtccagatagaccacttagttagttgatttaatttaatggcgttatggttgagataaatgcatttaaaaactagattgttgaatggggtggcgggtcgtatgtggtggcggctcgtatgtgaattacgttagttacttagttagttaactaacttagttatatgtattagtaacctatttgtcgatctatcccggattagacgggacgatacgatctagtacgtattagtactagtacgtactccgtatgcgtacagatcatcttctactactctggactagttattaggatggcttattctctcttctctctttcatacttctatttgacgaaaattactattctaacctagctcctcggaaaacacttgatgaaaatcatctgaatccctctgtcctattctatatttgacgttttggccgtgtaatactctcacttttttgcccaaacgcaccccctctccccaaatctccgcctgaccgtcaccccatttcgacggtacttcgtcatcttgcgtcgcgtgtgactttacgtagctagtcgcccgtggccacatcgcctgagtggcgccctatcacggactaatatagtggcttccaaggttgtgcccaggtggtaccgttgctgactccttgcggagaacgtcttatcgatatcattaattccatccgactccgcattcttttctccgggacaaagggctgcgaggttcagcccgtcaatatcgccatcatttctccgacttctccctcacgcgcctctaacatacccctccagtccataccctctgattctcgctcgatccattcggccaaattattggagtctaacgagaagggtaatcgacggtcttcccattcgtctgctcgctcggtcgggtctgacgtctccatctggtcagataccggtgacctcgccgagcagttcgctgaggctgaagatccgctacagattcaccttctcaattcctcagactgccggctcttgcgtcaaaaagagcgaagggagcagcccaaacacgtccgctacccttcaaacttgaacaacgagcgttctggcgtcgatattgaaaagatcaaaataccagcccctcccccgcgacatatttcgagagttgaacgcgtgctggccgccataatgacacccagagatggaccaaacacccagatgcacggcttagtcggaaaaccattactgtgagtgtcttaaaaggccaataccgtaatttttaccactgactctggtttgcatgtagttacttcacgagtgtgtttgtatcactgggtgtctttctctttggctatgaccagggtgtaatgtctgggatcataacgttcgtgtctaatccctcgagcatagactcgccataaagataacgaggagcggaatgtggctaacagatacagtggctggtacttcaaagattacttcaaccagccttctcgggctacaattggcactgtggttgcagttctcgaaattggtgcattcatatcctcgctccttgtgggtcgtatcggtgatgtgatcggccgtcgaaggactatactctatggctccattgtgttctttgttggcggtgcttttcaaacattttccacgggtatacccatgatgatggtcggtcgtgtgattgccggtctaggcgttggtgccctctctactatcgtgccagtttaccagtctgaaatatcggtttgtactcccatttctccatcaatcctcaaggctttttctttgtctccctccccattctatcgccaggtacgctgacgaattttaagcctccccacaaccgtgggaagcttgcatgcatcgaattcaccggcaatattgctgggtatgcgactagtgtgtgggtagactatttctgtagcttcatcgataacgactactcctggcgcctgccgcttcttttccagtgtatcatgggtgccttacttggagttggcagtctgatgatctgtgaatcacctaggtgagtagaaatcccatccattgtctgctaaggctaactcccaatcctttccttaggtggcttcttgataatgaccacgacgaggagggtatggtggtgatcgcaaatctttatggcgaaggcgatctcctcaatgacaaggcccgtcaagaatatcgtgagatcaagatgaatgtccttgtccagcgacaagagggtgagcgatcctactcggacatgttccgccggtatcgcaaacgtgttttgattgctatgtcggcccaagctttagctcaactcaacgggatcaacgtaatctcatactatgcgcctctagtgtttgaatcggtatggacctagagtctccctccatggtgctatgccggatacaaataatattcaaaagggttcaggattatgctgaccaatctaccatataggccggttgggctggacgggatgccatcctgatgactggaatcaatggtatttcatacttgctgtctaccataccaccctggtatctcgtggatggctggggccggcgaccgattttactcacgggtgccgttgccatgctcatttcgctttctcttatctcctactttatttacatcgagattcccgccaccccaaccctgacggtgatcttcgttatgctctataatgcagctttcggggcatcctggggccccattccatggttatatcccccagagattttgcctttgagtattcgtgccaaaggtgcaagtttgagcaccgcttcaaattgggcattcaattggctcgtgggcgaggtaacacctgttcttcaagaagttatcaagtggcggctatacttggtccatgcattcttttgtgcatgcagttttgtgcttggtagggtccctcatccgtggtcatctactagggaccatcatactgactatcaccacagtctattttttgtaccccgaaacgagtggggttcgcctcgaagatatgaacgttctttttggcgatgcttccactgccatgccaacacccgccacccaaggcgaacgggggtcgctaatgggtgctggttcacccgtcccatcgctcgacctgcgtcggcagtatggtcaatttggggcagataattccatccctggcctagatattgatccgccgacttcaagccacgagggaactagcaaacgcggacgctcaaattctcaccagggcagtgtccgcggcgaaggaattggtggctggatctcaaacatggtcagtcgaaaccgaggagcgggcgccggtgctaccagcagtcaatatagacgtttggagcaaggagaaggcgaatgaaatatttacgggtaattgtggccttggactggatagaggaagcaagaaaagaccaaagaatccgatgttatatatctcctttccccatctaccaatgccttctgttgatctcgagttcacgttcacggtatatacctatcatacgaggctttgcattgatgttgttctggaattttcttgttacatatgtgtctgtgccaatgatttttatatatatataaataaaatatctagttataatacatgtactataaatgattggtatatttatagcacggagctagaattacaagggccaatgttctgaaaacggcccgctaaaagtggacttgtttatcctccctgaggccacggatctcactttctccttgattccctcagcccactctcttgtctcacttcacttcacttcacttcatttcatttcatttcgttttctttttctttttctttttcaatctacttctggcattgcttccggtttatccgctagatttgcccccattctatcactcacttacccaggggaatggctatgttctcttaaatctatctgtccttctattaccggtctacctcggtattccccagtttaatttcttactattctcgcattttgttggtacattttctttcgaaaattctacaagacacacacacacacactatggtgggcctagacactgccgtgagcacgggtgccaaccatgagtccgacctccgtcgaagaaatgtccctgatattagcaaagttcatctggactccaatcggacgaatgacgaagatgtgaagaaagctagaacacaggtgaggtagccttcttgaacatcatcatccacgcccttctaacctcccctgaacagtcaccctcgttcctccatgtgctagctaactgggagccgatcattgctcccatcctcttgactgccctcgcactcttcacccgcctgtaccagatcggccgttccaacattgttacctgggacgaggcccacttcggtaaattcggttcccactatctcaaacgcgaattctacttcgatgtccacccgcctttggggaagatgctagttggcctatccggatatcttgctggctataatgggtcttttgaattcaagtctggcgagaagtatccagaagatgtgaattatacctttatgcgagccttcaatgctgcctttggtataatctgcattcccctggcctactacactgcgcgagagttgaacttccgtcggcccacagtctggctgatcagcctgatggtgctgtgtgagaattcctatgcaacaatttctcggtttatacttctcgactcgatgctgctctgcttcacatttactacgacgatgtgctgggcaagatttcaccggttgcagcgtgatagcttttcgctagaatggtatgcctggctctgtttaaccggtttgagcattgggtgtgtctgtagtgtcaaatgggtcggtttcttttgcactgctcttgtcggtctctatactattgatgacctgtggaataaatttggcgacctaaagatgccacgggtgagtacctgctatcagccccccttgcctagaaggtgatcaccgattagctggctaatgcggacgtgtttggacaggctgtactcgcaaagcacttggttgctcgtgttgtcggattgattgttattccgatcttggtctacatgttttctttttatctgcacttcttagtgctggcgaacagtggtccaggtgatgcccagatgagctcgctttttcaagccaacctacaaggcactgaagttggtagagatagccctcttgaactcgcaattgggtcgcgtgtcacacttaaaaatatgggatacggaggagggcttctgcactctcacgttcaaacttacccggagggatctatgcagcagcaggtcacctgctaccaccacaaagatgccaataatgactggttcatctaccccaatcgacaggagccggactacgatgccactgctgatctgcggttcgttggtgatggcgatgtcattcggttgattcacggacagacaggtcgtaacctgcattcccatgctatcccagcaccaatcaccaaatcacaccacgaagtgtcatcttacggaaatatcaccatcggagacgacaaagaccactggaaagtggaggtagtcgatgatgttgcatcttgggaccgatctaggatccggacactcacaacagcattccgactccgccaccctgtcctgggctgctatctacgggcaggaaatgtcaatctacctcaatggggcttcaagcagattgaaacaacgtgtaccaaggaaaacaaacccggcgatgtgtatactcactggaatgttgagtctcacaccaacgaccgttgtaagcttatccttttgccaaacacttgatattgatgagcccaatcagacttattgacctatccacagtgccccctggtgaccctggctcctataaatcgcccttcttgaaggacttcatccacctgaatgtggccatgatgacctctaacaatgctctggttcccgatcctgacaagcaagatgacttggcttccaagttttggcagtggccgattctcaatgtcggcttgcgcatgtgttcttgggatgatagcgttgtcaaatactatctgctaggaaaccccctagtctattggggaagcactgccgctcttggtggatttggtcttcttttcatttggtaccttctgcgctggcagagggggtacaatgatctcagcaacgaggaaattagtcacatccactactctggcatatacccagttatcggatgggtcttgcactatcttccctttatcatcatggcccgcgtcacttatgtccatcattactatccggctctctactatgccatcctgaacttcggcttctgcgttgattgggtaacacgcaagatgaaccccagattgtctgcagcggtgtatgctttcctctacgtggttattgtcggattgttcattcatttccgagccatcgtgtttggaatggagggttctaaccagcaatggagtcatctccgctggctacccggatggaaaatggcgaatgtgaactaatcatggatcgtttgatgacttgttctcgtcctctctgcttgttagcttgtgttgactaccccaaagtggaccttatatgcctacaggtaattgtatcaacccggacaattcaactttacttctgtatttgtaaagaaaaatgcaatgttatcagagatactagagtcttcatttcgatcgttatagccacgcttagtgtctggtaacaacttagttcaatagtgatgaagatgtgtccgggccagatgttgctgactatttattattacgggctgtggatttagcaacatcccccggtccaactgttgccacctttgcgcatagcatcatccattcccaatgtgacggttctagggatgcccgtgtttgctcctcccgaggctccgaaccctttcacaccgcttcgccgatcattgaggtcgtattttcccgtttcaatgttacgatagatcctctcagcaacttccaggaacgctcgttcaacgccatccccagatttggcgctcgtttcaacatagcgaaccacattgttcaagcggcaccattcttcggcctcctcctgggtgacctgcctttgatttgatccagaactggcccccgtcagatcagtcttattaccgaccaaaataacaacgatgccatcttctgcaatatgccgtagatcctgcagccactgagtgcaagatataaaggtcgagtgtctggatatatcaaagactaggagagcgccagaggcaccccggaagtaagagcgggtgatagacttgtatgtctcttgtccagcagtatcccacagtgatagtttcatgcgcttttgattgggggaaccttgtggttttcgtggaggggtaggaagaccagaggtggtagacgcttctggaaatgtatcacccgacgatccggtagagggctcatcaagttctagctccagtgaagctggaggaccaactggcacaattcgcgacccgaactcgacaccaatggtcacatcatgagatggggaaaaacggccttcacaaagtcggacggtgagctattgttcagttagcgtaggtccaaggtccaaggctgatagcacttacgctggacttgccagtgccagagtcaccaatgcagacaagcttagcaatataatcccatggctgtgacatggagagagtagaaaaaaatccagaatcagaaatggggaaagaaagcgaaggtcagtttacctacgacgtatgtcgatttggagacctcatggttatcagctgagtcatctatcaagcctgacgtgcccgaatgacgctttcatcagctgcgtgaccctagcccttcaccttatcccaggcaccacacacatcctctctcctagatttggcatatctcaaacaaattcaaagtctttcctcttaccctctcttccctttactctctaatatccgaccgtacttgatttcctcgacatatttcctttagtgatctatcactggtcctgtcccactcaccgtactttcttcgttacgataacaggccatgttctctgaatgtaagaactggaagatcctgagtattagaagactatatggctaacacttcgctttagatgcctcccgattccttgctcagtcacagtcacgagtaacctctcgaccagatgaggttcaaagaacgggccgtagccgccctggtcaacatcaaggcaaccctcgacacccctcatcgcgctccttcttacgacctaccgatccttatcgaccgggtgcatcccagacagctcaatttccttttgcccctcgcagctcggttcaacaagctcccctcttcttcagtgccactgatgagttccgagaggaagatgacgaaacagaacgtgagcgagaaatagctgatttctatgcactccaacgatcaaggcggcattttggcgacagcaacttgaaagaatcttcagaacttgaggattctgaacgttcaggtcttgaggaaagctcaccatataacgatcgccctggcaaaggcatcaagagctcatggcggggagaagaaggtgtttttggtgcccgtccttttcctatcgagtctgtggcagaagctccagagcacgaacaggcacctcggtccagcccaagcagtagcaaagttcgaggccatctagttgatatcggtctggaggattctttacgggccgattttgacgatgatcagacgttatccagtcccggtgctcacgacccacctgttcagcgattccgagaacgagaattactgaaggagcactctggtaccagccagcatggatttactggcgaacaggctgagattttatcgcaagacgttccacggccgcccagctcggcaagttcatttccaacaacggtttcaccgctagcctcagaaaacacagtgcacgacgccttttggggccatttatttttgatatctctcgcgggattatttgcttctgcatttctcgtatatcttcacacatctaccccgtctggagacaaatcaagatggggggatacaatctacatgactgtccatcgatcgttcttcctcctcgggatatatactattgtatcggttcttgtgtcccttctttggttggcgttactacgatcctatgtgcgacttctagtccatgtgattctagtcgccgttcccactatattatactctttctccttgtatcctttcatctcaagtttcaagggaccgtggcatggcaccagtatccaagacaaggcgatgaggtggggctctgctgtcccgtttctcatagctaccatgtggatctacaatgttgtgcgtggccgtcagtctatagggaaggccataggcattcttgaatttgcctgtcgaatcttggccgccaatcccgagctgcttgctcttggtctgggtgccctaatctgcgttgtctcctggacgtggatctggatgctgatgttcactcgtgtcttcttgggcggccaccttgttagctcaagatcgttcatcattgacgtgggtagctggtggctcgctatctatttcgttgtagtttatctatggtcggtcggcgtcatcgcaggcatccagcgtgctgtcaccgctgcaacagtgagccagtggtatttccaccgtttggccacacccgcgcccacctcgaggcagattgttcaggcagccatcgttcatgccgccacaactctctttggcacgatctctttgtccagactactcgggctactggttcgacttcctcttctattgctaccagatcgcatctgctcgttgcttagcctcttcgcctattcactcgttcccaccccaattacttacttgaccaatcctctttctctcacctatgcagcgattcattcgcaacctcttgccgcctcctcccggggtttgagccaaatgactgtccttgccccatcggcggcctccacgtctttaaacccccgttcatattctcggtctcccaggagctctgggtctttactctcatacaggctgtctaaattgatcctctacgctgcccgcttcataatgtccttggctttagggttcggcggttgggtgactactgctcgaagcctgacaatgtcggcatccggtggtaccattcgtggcagtctttatgcctacgtcgtcggccttattgctggaacaattggttggaccacactgggcgcaatggaaggtgtgatcgcagatattgtagacgcagcggttatttgctgggcaagcgaggtcggtatttacggcagagaagcccggtattgccgcgaggctggttggctctttggtgactcgcagcctcacctagggcatgaatatcaagaggtctaggtcgttttttttttgtcgttctttcttcatcttataagtccctaacgcattctctctcatggttatgacatttgcaacaatcctttgtaccattgagcgttttaaaacattcctatatactttagcgaaattcctaactctcaagtagaagacttgacaggcaaatacattctacatttatatctcggttgtacgcgattccaaagcagctagctctctgggaaaataatttattcttttgcatgtcccatggtatattcgaattgcaaatagctgcatgaaaatccagggctcgtggtatcatgagaaaatataaagagaaaggaaatgacttgtgcgggaaaaaagacaaggcctcccctgagacgccatatgaagcatattccgagcgacgaggagaacaaaggagaaattatgaaacatgaatcagagaccaagacgtccattccactctactcgttctttcgagcaccattctttcagcagggaccagccaaaccgaacaacttcgatgggcggggtagtgccaccaaatggtaggaaatagcctccagcataatctccagccctgagggatgatcggcctctttccgaataatttcgagatcgctgcgaccagatcgtggggaactcacgcccaaggacatcttcagaaagaccccgggtgccctctacccatagtctctgggaatccctgtaggactcaggaagacgagccttcagttctgaaaattccttcctgcttttcctgttctcgtccgacagggctgcgtttccatcactcccaggcgtaggaaacggggtgtgctccccaggaattgggcttacagcgaggcgttcaagatcgagagtgtgaatggcagtccaggacacagccccaaggagcaaacagagactgtttaatgccggatatggtacactgttctttctgaccacacgccagtatggcacaatagacagccatgtcgaggaatcgccgacctggcgtgacgaagctttggcctggtcgttcgctacaaatgccataataaaggacaacaacgcttcgattgcagtcacaacggctagcttttcgtcagtgaccgaggttccggttttggaggtatgccgctctgcggcatgtttcaattcacgcccgatgctagcaaacctttgccactcatcccaccataactgccgctcattgcgcgtacgaccatctccctgtgtcggagaaactttcagggttgacccgggatcaacggattgacgtttgttggcgggattgggaggattcttgccatcggtcccatcggtctgtccgagatcatttcgacgagaggcaggaggttttacgtctttcagcggcgtgatggaagctggtttggttttgtcatgggtgattgaatgagaggtcaggtgttgctgaggaaccggcgttcgaggcttttcaggtaaggtttttggctcccttgaatgaccagcttcaggaccaagagcttcctcagtctcatgcttcttgcccttcggatccgcgaatgtgtgcccacgagacgaaccagtatctcctcccctcttcctgggatgagagatatcatcacgatctgtatcctggctaaccggtgaatcggacagatgggctttccttttaccagagaatttaagcagagcttcgacacgctttcggtttgctcttccgtaccgcagtttggtaagaagctgcatcttttgtgggtcggcacgagtgtggtctcttgtatgttcgtggatattggattctttggcaggcaatccttttcctgcccgactattgcgagacggtgaacggtcctcaaggcgagccaactccctttcgatgtctggggggagagtaggagacagcaagcgcggaagtctagggccacccgatgtcggtgggagagtaggcgaaagaagtgtggggagcttgggggagtgtaatttggcagggcagggctctcggtgtgtctctttctcgggagagagccgcagtttctttatatgatgtgcctcggacttcttagttgctgaggggttatggtattcaggttccggcccagacggccgtttctggcccgctctttcgggagagagacgcgtatgtgactttggcggcattcgaggcaatttagtcttatcgttattcttgaggggttctgaagatatcatctgtcgtctttcttcggacttggcggagcttgatacgcctcggctacccgcttcgaggccaacgggggatgcgacagggccactggtcttctgagtcttgtagtcctttaggctaatcttctttttggccactgtttcccttgaactttctccaacgcttggggctgttgatcgatcggccatcatgcgccctgtttcgtctgaccagtccccgaccgctagaagcaatgagtctgtgtcgtggtgtgtcaagaaggtcatatattgtagttgctgctcctccaagctgaagggtctgtcatgccctacagcccaattgttggcgggccggttccccgggttaaagggcgttttggtcggaaatgtgagtaaatatggaacgggggggagaacgtcgtccgagaggtgctgtaatcgttggtcaagaacttcacggtccgacgtggaggaactcgcagctcggaggtttgtagtggtttgggaatggcgtttctcgttcaccgacatcgcagtgcgcagggtttcgcgaattgttcttccacaagagatgctaggatgatacgcgcttcaagcacaatttgggccgaagtctatcaccgagtcctgttgctcgagtcggtatggcgagttgcctggtgatagtcaacgcattgagttaagtgaaggatagtggatgtacaagatccggccttgttcaggtgccgaataatcagggcatcctatcactatcgcgcgtggggggggtgttcccataaccctgggatttcgaagccacgcaattgggagggagaactaaacacagggtaacaaagaaaaagtgggatgtgtcacaatgagagggtgacctctttccattaaggagcgagagatgggaaatgtccccggatagaatgaaagagaccgatgaattggagaaggttacgttaggtcggttacggtgttgcttatcggcttatcgttaccgtataatttcattacatacagccctggaggtacttgcacatctattgatgaggatatataaagtctcgaacacttatgtacatgcacatgcacatgcacatatgtatatgtaggatgtatgtgccttgtcggcctggtaggatgtagggaatgaatatgtagaagttactccatgccagggttgtgttgttgaagcctcaccgttcaggaacggtcatcatcggcaaacttctcacgccagaatgcacggtaatgtttctgctcgccaaccttggagatctcatcaacctcttgaggagtcagtttgaatgtaaacgtgcgcaaatagccgttcaggcgggattctttgccactagtggtaatagccacacagccacggtcaattatccagcgcaacaagatctcggactggctgactgcatacttggtggccaaggaagagagcagagggtccaatggaccaccctgggcccgggtggcaggggtgagacccccataactaacagtcttgatacccttactctcttggtagggaacaagattgccacgttgaaggtaaggatggaactcaatctgattcacagatggtaccactttagcggtctcgagaatggtctccaagtcgctttgtaagaaattggacacgccaatggaccgggctttcccagatgcctttacttgctccattgcggcccaggcagcttgaagtacatccttggactttgcgaagtacggagcatggatcaagtacctgctccattgattagaagcagtccccgggcgagccattactcacatcacgttggagttgacttacagatccacatagtcaagttggagcttcttgagactggtatcaatagcctgaggaatatcggcaatattggtgatgaccttagtcgtcacggtgagtttatctcgagataccccgctttctttaattgcctgccccagttcctcctcggtttggtagacctcagctccatcgaggtggtagtatcctagcttcgttgccatcttgatcgattcgaccaattcatgattgataccgatgtcagcggacttcttaaaccacgcggtaccagtgccatatccaagctgtatttgttagagaatattgcccatagtatctatgaatgtggggtaatgatagataactcacgatagggaccgaggtaccgtcattgagatccaatgtaggaatagatgaaataatgtttgccatgattccaaggtgttccaaaagagtaatataggatgatgaaaggtgttgtaagggatacttgggccgtggtacctgggggaggaggggcttgtccacgctagacccgtggactgggcaatgattaataatgtcaattatgtcatttctaacctcccgggagctgcctccagagctctccatacttccagtggccactaccttcacttggatccatatccccgaattacttggtctctccctctctctatgaacttccgtctgctcgccgcatgttcaagaaattggtatatgtttccacgcagctttcggccaccgtcggttcggaaccgtttaaaccaaatggtatcacatctttcgactgccgggatctcccttgctgagttaccgaaatcaaatattttcacatctaaattaccccatgatccggctttcgatacaccggaattgtctcataaggccccaagggaaactttggggcctcgcatggtcaatggagctttgttcacatatattcgcccagagcagactgccgagccagaactactaggagtcagttcgaaagcgatgaatgacttgggattgaagccaggcgaggaacaaacgtctcaattcaaggcactagtctccgggaatgagatttggtggaacgaggaacagggtggaatctacccatgggcacagtgttatggaggtcagtacccacgttgtcatgcccgagaaacccagatgaaactaacctgctcaggctggcaattgtaagctacggaggaagctagatgtgacttacagctgacaacatgcagcggttcatgggctggacagctcggagacggggtaagctaatggattaacatgagttctcagttcactagaaatactaatgattgacaaaatagcgtgcaatcagtctcttcgaatgcaccaaccctcagacaaatacccggtatgagctgcaactgaaaggagcaggcaaaacaccctattcacgttttgcagacggcaaagctgtcctccggtcaagtatccgtgaatatgtggtttcagaaggtaagtaaagctgtatgaaacccaaggatagaccactgaaacattgctagctctatctgccctcggtataccaaccactcgggcactctcactcaccttgattcccaatgccaaggtattgcgagagcgtcttgaaccaggagcaattgttgctcgttttgctgaaacttggctaagaatcggcacctttgatctacttcgtgttcgcggagatcgtgagttgatcaggaagcttgcgacatatgttgcagaagacgtttttagcggatgggaatcccttcccgccattgtatcgctgggtgaccagcagtcttccacgcaaatcgataatcctcgtaggggtatccccggcgatcaagtacaagaacaccaggatgtacaagaaaatcgatttgctagactgtatcgagaaatcgctcgccgcaatgctaagacagtggctgcatggcaggcctacggcttcatgaatggcgtgctaaacaccgacaacacatccatttatggcttgtcactggactacggcccatttgcgtttatggacaactttgatccccactacacaccgaaccacgatgaccatatgctgcgatacgcatatcgcaaccaacccagcattatctggtggaatctggtccgacttggagagtcattaggtgagttgattggggccggaaatcaggttgacgaggaaagcttcgtcaataacggggtgacgaaggaatttgaaccggaactcatcaagcgtgcggagaaagttatcgagcgtgtgggtgaggagttcaaagcagtattcctaaacgaatacaagcgcttgatgggccaaaggctaggactcaaaacacaggccgagtcagacttccagatacttttttcggatatgctagacacactcgaagcacttgaactggacttcaaccacttcttccgccggctctcagggctgcctctatccaatctggagaccgaagaaggccgaagggaagcagcctcggtcttcttccatgctgaaggtttcggtggaattggatacactgaggctacagctagagatcgcattgcgaaatggctggatatttggcggcttcgcgtcctagaggactggggccccgcaaacgacgaggaaagacaaaaggccatgaaatcagtcaacccgaacgtaagtatctgctgaaatcttccttttgaagtccggtgcccatcgactaacctattgatagtttgtgcctcgagggtggattcttgacgaggtcatcgagcgtgtggagcgcaaaggagaccgagatattctaggccgggtcatgcatatgtctttgaatccattcaacgatgaatggggtcttcacaacgaagaggaagagcgtttctgcggggatgtccccaagtacaaaagggctatgatgtgcagttgcagctcgtaatcaagctacgagcgctataccgatctcagttctctgggaggcgagtgtatgatatatgacttttttaaggaaccagaaccgattggagctagatagcaaatgcatcggctcccacgagatagcctcggagaattaaacgtgcaaatatgagtatttgccagactccctacttcacattttatacgcgttatcataaaacccgcgaattaccaaacaacctaggtgggagtcatcaaagttagatcgtgtcaaccttgtcaggcgttgatctctaatcatacattttcaggaaaaaaagagaaattcgtttcgtgcatgcatgaaaaatgtcgtccaatcccatggaaactgtagaaagatgttgaccaaaagagcaatgcaagcaatgggcaccctagttagggcaagcggactgaacgtggccgggctgcttgcacttgtagcacatgcgctcacccttggcctcagtggggcagtcgcgagagacatggccgacttcgccgcctacttacaagttagtagcatattccggcgaatgagaaaacccggaataactgacagttgtagcacttctgaccctgagtgcagtcacgggccatgtggccgaagccaccgcaggagtagcaggtctgttggcgaccaccggcaccacctggaccactgaacccaccaccgtagccgcctccagcgctgtaaccaccactgtagttaccaccctgggagcagttccgcgcgatgtggccgacctgtccgcacttgtagcactcctgggaaccaccaccgctgtagttgctgtcgcctccctgagggcattcgcgagaaagatgtccggtttggccacaacggtagcacgacttctccttggcaggttcctggcattcgcggcctttttaaaaaaatgttagtcaagtccaaatagagtccgcgatattcaattccaacttactcaagtgaccttggcctgaaattgtgattgaattgattagcaacgttctaataaccagtccatagatccaatggacgattttgaagtgagcgtaccgttgcaattgtagctattggaggactgggttagctttttgaattgacagatcaaagggaaagagaaattaccaggtagggtttcccttcttagggcagtccttggcctagaaagagcagataagcttcgagtctccttttttaaatcaagttttcaagaggaaatcgggcaaaggttgtaattacctggtgggaggcctcgccgcctataaaagaagagagttagtaaatatcagcttgcgcaatagatgtcgcaatagagccccggatccaattcgagtaccacaagctctccgaatgaatatgacgtattcacaggatttgaccaagccggtgcttatttctcccagtccaggttgcagtagaagggaaaaaagaacttacagttgaaacagccaccacgtcctgcaggagggaagtccatatttgaataaggggattgggaattttataagagggaaagtaataagtcgttaggaatgaagaagttgaagaatctgaaaaatataatattgtagtgcggggagaaatcttcccgcaaagctgaccgccctgaagagagaaagagatggacttctttttgattcaggatattcttgctcgtctgcttctttctcacttggatattctgttttctgggtattctgttcttctctggattccccccagtcctcacccgagttttctagaatggaagtcatcacggattcagagaatgcctgccctatccctttttttatccatttggaaaggtgtaatgtaatggatgagaccggagaatggaaaataacaaaagtcgaacaaagattcagggtccaacttttatatataggagaacaacccctgtcttgccagggtccccagtccaggtgggctgagtaccttgtgctaccgaacgcccgctaaacaacacgtcacagccaagttagggaatgattccgtcttcattatctgttggcatacctcgacaatatatatatatatatatatatatatatatcttgtgttaggtgaagtcgtaacactcaagtagctgtgttccggtcctttctcgaaggagaagtacccgttcatcatcaaatccgataggcacagtcacttcttgagtttccagatccacactgcccaaactgtggtaaatcggtcctaatcctggttctggttctggctcgggttccccgtccttgttcccagcgttgagctgaacaccgttctcctcgaagaatttgcgactgcccagggatgatatcgccatctctaactcccatatccgaatctcatcccctcgagagcttacagagacggctttcccgcggttggtcacctgaacagcagatacagaagaggtgtggccccaaagtcgccggcctccttggacaaacaaagattccaatgtagatacaacaaggtacatagtcaacgtgttatcggcatgagaggtcagcaaatatggatgggaataggacatagaggttggcggctgttgatgtatgatagacggtgtcccagggtcaatgggaggttgattgtcgaccgactcggttgcagagtgccgcctttttctggattgaagtggcctcaatccatattgggaatccactgtagtggccagtcgggaatcgagttgttgcccatctttgcctagacgcagttcttgtatcccctgagaccacccacagccaatgtggaagaaactatacacaatagtagcgacaatttcaaacgacgaaactctaagagatagtgtcatgggtgcaatcatgttatctgccttgagggaggcaacccggaggggctctgaggactcggcggttgcccccggttgatggctgccaggttgcagattgtacaaggtcaaatctttgtgctgagacactaccattaaatacggcgacgatagagcaattgctgttatagcagcatcactgcggccgacatgagaagactgcaagtctagctgggatgtttgaagatacaagacgaagaggctgaaatgaccattttccagaccaactgagatctcgatcttatcttggatctgacttactgccaaggcggttggagtcataggtgatgatctcgatggagttgacaaaggaactcttgcgagacaacatgctgaatctcttgtggtccaagcccggagcccgtgcgctgagtctgccgtaaagacaatcccagcacaaaacttgactagcgtaggagggcatggcggccgaggaaactctacctcggtaacccgacatagccctttggaccagttatgtctgagccgatactgccgtttccaattgccttcctgtgccaagtgcccgtggtcgaaccacgttgcgaccttgggcgaataatctgtcttggatggaagggttgtgcgtctagtatttgcaaggcggcgggcacggggccgcacccattgcgagtagtattgccttttccatatctcagagtctccaccaagaacatggaagcgatgtgataacctgaggtagcaagttagcgagacctaccgagaaggaccgacgaaaatgagagtatatatatacctttgacacacgttaagggatgatactggtagaaaagacagaatatggagcagcaactcattgctcagacgagacagacgatcaacaggcctgatgtcgttccgagtacggatccgcttttgcggtagatcggagtcccagtggtctctgcatcgtttagacatcctttctcgggctaaggaaaagaagaaaaagctttgaggagactagtagaacgaatcggagaaatcattccgcacgttcagagaaacaatagtggttaaaggtggagggacaattgtacgtggagttggccccgagccaccgaggatcttatcagcaagtgataagctcacgtgtgctcatttagcctcgacgcgtcgtcgcgtttatatctctacctgacatgacgtctacagcttgttttcttttccttttcattccgatccgtgtggttaccctcggtgctataatataaacctcacaatggaagttgtcaaggagctccacgctgctgtggcaaatgcatgtgaggaatccttcgacaatgcctataagcacatgaaatcccatattgatgcatacgtcaaagaggcaaaattaaaagaatcaatggccagccaatcacagcgacgatcagagaccagaattcgagagcttgaacatgatattacggtactccggagtgagctgcaacaatatgaagttgatccacgggatcttgaacttcccggggaatatgccaatctagagaccgaatttgacccgaaaaacctgtggggggataacctggaggaggaggatcatcgcagttttcggaagtctcggaacagagttgaggccaaatacaccgcgctttatacaaatttacagacattcatccaaacttggagtggtctcaaatctcgagttttgcagcataaaaagaagctacggcggtgggatcagcaattagagcgtggagaattctcgcttgttctcaatggtcaacccgtcaaattccgcagggtggaaagtcccaccttcgaggatgtcgacaaacactcggagacccaaggctcctcgaagaaacgcccaagagaagagtttccagatcttcctgccaaggccatcaagttgtcacaaagaaggtcccgcgcagatgatgaacatgcagatataagagttgaagatgataaccaaagagtaattcacggcttaacatcagagtcagcctccactcagtctagttctcctagacccgatatggaaccctcagaatcttctgatacaatatgtttcctacctcatgcctgcggggagcagactcggcagaggctttccccgacacttcccgacaggtgtcttgtgcacacccagcggacggtgatgagcttggagcgccctgcagttgtcaaaaaagagatcttgtcctcgagtccatctcgaggttcaatacacaacagtgaacagccagttgtaagcacgcaagatctggatgagataggggacacgatacggacaccaatcaaacggaaagcctaccgggatgtcaatgtcgcacatcactcgaaacgaattccgataggcccgcaagtatctcaacagccatctataccccaaccaggtgacagcaacatacgcaaggctacattctctgtacagggatcctccacgaaacgcctccaagatctagagcgacgcgcaataccagctctggcagaagacggcgaggacgcgacctccttaccgacgtcttcgaaaattggctccggtgtcaatatcagaccttcggaagccaagacaaatagtggatttgcacaaagacgcctggaagaccttttggaacaatcggtgccccccagatcaccacttcatttgtcgagcaaagtctccggccttgattcaccaaagccaaacgatgcaacccgcagtgatcaactaacacccaagacgttgagtcaaacggcgccaaatataaaccccgatgatgaaccatttcgggcaagacctcttcgttgtcttgggttggaacatttcaaaatcaatccggctagaaatcaagggcttgattacgcatatgatgcagttatccgaaagaagcatgaccgcaaatgcatatcaggctgcactcgcccaggatgttgtggggatcggttccgggctatggcccgccttgggggtttccccggtaaatctggagcagaacaggagaaagaagatcaggcaattctacaggaattcctgggagaagatacacaattgcttcgaaacatgagcggtgaagagcgtgaaaatctcctggtggaagcgagagccagggccctggccaaccaatatggacgacatcggcatacccatcagcgggctcaatcccctcctggcttctggcggactgagatgccagatacacaggaggaggaagacgaccttgaagctgccaagaggttggagcgtgagaaagtggaagagcgatatcgagaggctatgcgccctggggggttatggacatgggcggatgaatgatgaataagaaaaacatatttctatagcctattcaatattgatttatgactagaaacacatcatgaaaggtatccgaaaccatctgttcataggtaaatgtaagtatgaaagcgtcaacctcggcccaaggcatcttggcagacgcaagacgcgggaccacgtgccttgcaacctcccgaggtcaccctccccatctcctccgtcgctatctcaacatgcttgaagcttagagatggaaaccgttcgcaatatccagaatccaataccgccggtgctcttgcaaccatctaaatggctttctatctatgaggacttcgtgaccaagaatgccagctcggttggtcaagtcgagtcagcgctgagatctttgacttatatcatcccaggtgagttctcattcggtttgaccatgcaactgttcaataatctaacagttatcttctatcagggcgataccgcgaatcagatataccctcagaatgtggtcagtgtaacattgtacttgcctttgggcacgcctgctgatttcccctgcagtacactccggtgtccagttgttatcgttataccatgactctcttgtttcgcgagttgttgataggcttccgtccactgtcccccgaccgccgcccactccccactcccggtataccaaatactggacctctcgctcctcgctatatcgccaggtagcgcttgcgctacaaatgcttcagtataccgagcttctctgggagatggcagcgcggcggcgtggccagaaaacccgttggcgcgtggtcatctttattgaatttgcgaaggcagtctgccgattgcttcttctgcgattgacgaactccagacctctcgtcagtcctccacttccagagcgcgagatagatccaagaaccacagaagaggaggaaccacagagtggttggaatggaatggacactccggtcagcgagcggtcttcagacttgagttggaccatgcctcgcacgggactttcccttccgtccctgcccgacgtaaacgatgtgtcgaactatctcatctccaaagtgcttacggcagatgacattaaacccccgaaggcactcctccaccgggcgacaggacaagggcaactggctgaagtgctatacatccttcggcctgtcgtctatgcattggcgatgcaaaagtggagtggtgataagcgaaactggcggccatggcttattggattcggaatggagtatggctgccgccaactcgcaaagcgggacttccgtgaacgggtcgctggcggtcttcgggggtctacagggcttgagcgagaggaactgaagaagcgtggatggtcaatgggctggtggatgatgcgaggcgcattttatgagaacgtcaccaagtaagaaccctgcctctggtctgtctctggttttctgtttaaatactgacattgtgaaacaggtcctggctacacagtttaactggaaagatgaaaggcaagccattgttagacttggtaagcagtgttgtggaggactatgaatacctttgggacaacttctacttctcgactgctacgctgtgaatttccacagatgagctcagattttactcacccatgatacccattatttctatgtacaagtcactttttatgctattccatttttcatttgttctcactcttgctgtgcttcgcgcaaggggtatcattagtgttttattaagtttcatgtctaatcacatttcacggagcgttcacattcagagaacctcagtttgtctgtgcccataccaatctcgtaatccaaccttgcccatgcttttcccgggggctgatgatagtaagaactcatctaaccgagatgccccttcctcctcttcgtcgggccagtcgactcttgctcctcctttcatttcaagcatctcctttgcagtgccccagctaaatcgacactcattgccccatccaaacacagggtccatgttgcgccgaagccatccgacacacttggagtccgagggataaccacttccccaagtctcggaggttggtgtcagtggctgctcagcccggagcacggcctcgtacatgacttccagtgcaacgtcccgcgtcaccttggctgccacactggcggcgctgacacatgggtacaaggaatcggctttctttgccactgtgattttgagggatgggaagattcgctccaatttttgctggtatgtagcggggttcccaatcgtgtcaatgtatacttctcgcacatccactccacggtcttcaaccacccctcgaatgatctccaccgtggcatccatggcctgggcattcagattgtacactgcggtaggtgatctcatcatgccagaagagatatcgcgcgccgaaagtactttgaccgcatatccgcaggactcgaacaatgaatctcccggtgtattcaatagatgcatcaagttcgctcgcacggcgggtgtaaggactttgctgtcgtcaaagctgtgtttctcggtcaaaagcgagtggtgcagatcaagagggagatagaaggcaccgtaaaccattggccctaggactggaccacggccggcttcatcgacacccaagacacatggtgtactctccagtgtatcacgaattgtggatgaggtcccttgaggcgtgattgcgttggggcatggggtgtagtacgcgtaggactcgccggagagaagtggttctgaaatcacacttggaggaataaaggtggacgattcctttagtagattgacggggggagtatcattaggcataataggcatataggacattgaaagaaagaacaaaagaaagtcttgaaggtacaaagaaatgcaaaagatctcccgagtgcacaactgcacaacgcgtcgactgttcgggattagcgggggcgcgtgttgctcttcccgcctaaattccgcattcctcccctccaccttgtctctcttttgactgattttcttgattctctctctatcttttgatttcaattccatcctagtgctcaacttccaatatggcacgagggcccggaaaggcccgcgacttcgactactccaatgtgggaactaagggaaggtgagtcgatatgttttagtcaattccacttgtactaggaccgctaaactgatccaatacgtctaggcgcactggcatatcgctgaaggaaggtcgacgcgatgaacatggaatggaagaagttgacggcctcttctcgtctcctgaaaagtcgcctgtgcagctcaatgggtttgaagaggaggaaaataactcttcggctgggtccgagggcatgtcgatggacgaaggtgggctgattcagtgtcgccttatattgccgactcattgcgtgctgatgcacattctataggcaatgcgccagatcccatggactttctcaagggcacaaatggctcacgtacctctttcccccccccgcctgctgcgcggtcgccgatgaagactggcctcactgggtctccgcggaggacaccagcgttgcaatcaactccagacccgcaggatattcttgagtcgtctagtccgtctgacggcaaaggtttcgcgggcgcaccggaagaattacgccaagatccatctcctctttccactcgctcggtgaacgtaggacgctcaaaccagaggaatggcacacggcgaaaacccacgacaaaagcacagctagcgtcagaatccgagcccgcagtcatacatgacttttcagacttttccgacgccgacggcgacggcgacgagaacgcgagtgcattcgccacggtacaacaagattttggtggcagtctggatgtagaatctgattcagttgctgcagagaaggtacccgattctcccgggcaagaccaacacgaacatgacggcaattcatccacaactgacacgactccgcctcgggaagaacccgttctggcctccaagtcaacaaagaaggtggcgccaaatagtaccaaggcaggcaagaaccaggcaaaaccccctgcgccgcgcggacgtccaaagtctgaacgtcgtaacgtcgaagaagatgccgaccccaggccaaccaaaaagcgaaataccaccaaagcatctccaccggtgcgtgaacctttggaaccggaattggatcgggtggttgaggattacgccaaccgcacaggacctttgaagggccgaagtttgtatatcctcaaacgtgaaatccccaccgacaatagtgcaactcacactcgatctgggcgggtttcggtccgaccactagcatactggcgcaacgaacggtgcgtcttcggtgacggggaggcagccgagggacatcgataccctctttcaaccatcaaagaggtcattcgcaccgaggagcaagagcccgaaaagaagaagaaggggaaacgctcaacgtcccacaagtctaagtctaagaaacgaaaggatgactcttcggacgaagatgaggatgttgatctctgggagaaggaaggtggtgttcttcatggctacacactcaaatgggacgggaaaacacagacgagttcaaaggaggaggaagtactaggtatgaaccccagccccttcatatttggttcctttactaagtcgatcttgatacagacattgcgtatgctccctctggaatcgaaaccagagaagtcaaagactcaaccttccgatttgcgaagctgcttagctcgtctttcatcgggtctggcgttgtggagctcccacctgacggagtcaagaaacccaagaactccaagaaaatgcatatggtcttttatgtctgtcacgggcgtgttcaagtggatatctcaggtgtccagttcagtgccggaaagggttgtgttttccaagttccccgtggtgagtctcatgttcatggcttcttgattcgtatcaattctgacgccatgatcccatctccaggtaattattatagctttgcaaacacccaccaaaaggaggctcgacttttcttcacgcaaggctgtgtccccgatgagaatgagaacgagaacgaagacgaaacaccgcaaatgtcccaggatgtcggccctgagagcgaatttgaagccgacactcccaccgctcctgttcatgtccctgcgaagaaagccaagggtcgccccaagggcaagcagaagaagattggcaaatgatctctccatttactctgcccccacttctgttttcatgtttgtaggcatcgacaacgcgccatgatacctttcttctacgtcaatgcccccaagtctcattttatgggcatctaaatgccttttattgttattcgttcttcagcgatttgttttcatacgattaccagggaatttggcgtttttttgcctgtttctccagttaattatgcaatatctattggtgataattggtgatggaagagcaaccgagggaagctgggaatcagaacctcatgtattcgaaactatcgaaatgtattcgttcaaagtacacatactcagtgtattaaatctcctccattaggtcatctaggtcgtcatctagacccagcggggggaattctccaacctcgaccttctcgggcttcacgaagacgcccctgttgcctaagcactcgaagtagcgctgtccgcccacactaccgtcattcttccccatcggctcgtcaagctcaatcccgacccagatcggctggagatctgccggaagctttgcatcctgttgcagctcgcgacccgggccggtaataggaatagtcggaacaggtccaatgaagcggatcgtgccacgtcgaatatgcggcggagatgaaggcagaacgatagctcgtctagcaacagtgattcctgccaatatattattagattaatgaaagaaaaataaaaataaattgcattgacacttgaaattttttgtttcaacgaacctctcgtttgaatctcggtccggtctttctcaacttgatgtcgcaaagcctcttcgggcgatagagcgttagggtcaaaccgacccagcttctggttcttcttccaagccaacacagagtccgaacgggcctcgtatgtctcagttggcagcacatatttctcgactgatgataagtcggtaaagttagcccgcatggtttgcgggcggttgtcattgacctagtgaggggataaattagaatatgcccagaattcgtagcatatccattgccctgacaactcggatcaaacgacatgccgttttgggcccggtaaagcagccagaacagggtcaaatgaacagcaagacatagaaagaaaagagaacccacctcgatctccgaccccttgaccaacccccaatccccaatcaggcggtcgtccccatcggcccattggtcaggtcgaccgggaactttcacccgcaggcgctggcatcctggtgggattcccgtcatagtctctaactttgtcttaacctgcatcaccgtccaagttggggtgatgcggcgttcagtcaggaatcgaggctccgaatttccaggtttggctaaagccgcgttggtgatgatgacggagatatccatcggggtaggctggaatgccatattttctttgtatgacttgacttgtctgttcgtgtttctaggaagaaatgttagactgggctgtggattaatgcaaattctttgatggtagggtgaggcattcaaagaaaacaataatcgaaatcagacagctagattcaagatcctgtaatccttaagggtaaaaaaactaaacaaggaagactatgcatactattgcatgctgaatcgctgatatcaaattcccctgaggggcataagaagctaccggtacttgccagggcaactttgtggccgttggaaggaacacaacatattctagacgaaaaggacagtccttgaaccgggtaggtagtacttacagttgatcttgtgctcccctgtggttgacaggaaaaagaatatcgcccaatctcgaagaagcgattattagtaagcggtctccgccaggaacaggcaccgcttgacgctacacgcagttgagaatggaatcgacaaatgatatgtgagatgtaaagaggacaagatgaaactaagagccacctatttggtgcaggttatgtagataaacaattgcctaaacgggatgtcaaaacgatgtcaaagtaagtcaaccttctgtaagaaattgatataaaaacaagccacagctttgtagctgatgaagcttaactacttacgatatatatgaatactatttgtgtttaagtagtactggcattagaacactggggagccacaaattactacatagactaccgcgtgttaggaatacatatctagtcattcccatagaacaaatcaagtctaaccctatcatggaagccaggcatatcaaatataggctataatctaccatattgtgcaatatatcctatactatgccatagtagcttgcattctcatcagcgttcatacttcacgactgaccctttttatacaactctacaacaattggtcattttccaattaaaaaatagtcaagacagccaaacttgacatgattcaagcttgatactttatgctttttggaaccttataaaaaattcaacatcgcgaatatgatgtagatattatgcccgttacaaatcgcgagccacgtgatatccattctcgcttgacttttcaactctgcagcagctcccaccttattcacgacgagagcaacatggcgtcccaacaaacaggcgaagcgtatgagcagcaaaatgtccatgaggtgtaccaagagatcgctcagcatttctctgccacccgctacaaggtgtgtttcaagcgactggctatcaccaccttagaaagttccaactaatcacaattctagccatggcctatagtcgagcgatttctcacaagcctagaaccaggtgcagtgggtttagatgtagggtgtggtaatggcaaaaacttgatggtcaatcgagacgttttcatcattgcctcagataggtatgttctgatatgaattggattttctataggctacttcatttccctaggatatcatccaacttgtccattggatcccttgagcttgatctgggctaacccggtggcagatctgagaacttggctcggattgccctgcaacatcagccgcattcgaccgtggtggccgatatccttga
